(19) United States
(12) Patent Application Publication
(10) Pub. No.: US 2024/0228941 A1
(43) Pub. Date: Jul. 11, 2024

(54) ELECTROPORATION, DEVELOPMENTALLY-ACTIVATED CELLS, PLURIPOTENT-LIKE CELLS, CELL REPROGRAMMING AND REGENERATIVE MEDICINE

(71) Applicant: Christopher B. Reid, Los Angeles, CA (US)

(72) Inventors: Christopher B. Reid, Los Angeles, CA (US); Melissa Braga, Monterey Park, CA (US); Lilian N. Santamaria, Los Angeles, CA (US); Ashley N. Wickrema, Los Angeles, CA (US); Marinne D. Wickrema, Los Angeles, CA (US); Anthony Hao Dinh, Garden Grove, CA (US); Yaman Eksioglu, Atlanta, GA (US); Mat Hoang Ho, Birmingham, AL (US)

(21) Appl. No.: 18/527,576

(22) Filed: Dec. 4, 2023

Related U.S. Application Data
(63) Continuation of application No. 16/579,889, filed on Sep. 24, 2019, now Pat. No. 11,859,168.
Application No. 16/579,889 is a continuation-in-part of application No. 16/171,420, filed on Oct. 26, 2018, now abandoned.
Application No. 16/171,420 is a continuation-in-part of application No. 12/601,819, filed on May 31, 2011, now abandoned.
Application No. 16/171,420 is a continuation-in-part of application No. 14/764,195, filed on Jul. 29, 2015, now Pat. No. 10,138,451.
(60) Provisional application No. 61/849,589, filed on Jan. 30, 2013.
(60) Provisional application No. 61/064,761, filed on Mar. 25, 2008.
(60) Provisional application No. 60/932,020, filed on May 29, 2007.
(60) Provisional application No. 60/933,133, filed on Jun. 5, 2007.
(60) Provisional application No. 60/933,670, filed on Jun. 8, 2007.
(60) Provisional application No. 61/006,449, filed on Jan. 14, 2008.

(51) Int. Cl. C12M 1/00; A61K 48/00; C12M 1/42; C12M 3/00; C12N 15/10; C12N 15/11; C12Q 1/6811

(52) U.S. Cl. CPC C12M 43/00; A61K 48/0058; C12M 21/00; C12M 23/42; C12M 35/02; C12N 15/102; C12N 15/1024; C12N 15/1031; C12N 15/111; A61K 48/0066; A61K 48/0091; C12N 2310/141; C12Q 1/6811

(57) ABSTRACT

The claimed invention is directed towards a novel combination cell electroporation/cell culturing apparatus which can be termed a cell culture dish suitable for in vitro electroporation, and towards a device suitable for in vivo electroporation—both useful in methods suitable for the generation of developmentally-activated, pluripotent, pluripotent-like, multipotent, and/or self-renewing cells which are capable of beginning to differentiate in culture into a variety of cell types and capable of further differentiation in vivo. The claimed invention is also directed towards the generation of desirable, differentiating somatic cell populations transplantable to animals or patients, genetic modification of endogenous and exogenous cells, and the treatment of patients suffering from diseases that may be ameliorated by these methods. This invention also provides methods for preventing, treating, or retarding disease, for example, immunodeficiency virus (e.g. HIV-1, HIV-2, SIV, FIV, etc.) infection.

### CROSS-REFERENCE TO RELATED APPLICATIONS

[0001] This application is a continuation of U.S. patent application Ser. No. 16/579,889, filed Sep. 24, 2019, which is a continuation-in-part of U.S. patent application Ser. No. 12/601,819, filed May 31, 2011, which is a national stage application of International Patent Application No. PCT/US08/65007, filed May 28, 2008, which claims benefit of U.S. Provisional Applications 60/932,020, filed May 29, 2007, U.S. Provisional Application No. 60/933,133, filed Jun. 5, 2007, U.S. Provisional Application No. 60/933,670, filed Aug. 6, 2007, U.S. Provisional Application No. 61/006,449, filed Jan. 14, 2008, and U.S. Provisional Application No. 61/064,764, filed Mar. 25, 2008 and U.S. patent application Ser. No. 16/579,889 is a continuation-in-part of U.S. patent application Ser. No. 16/171,420, filed Oct. 26, 2018, which is a continuation-in-part of U.S. patent application Ser. No. 14/764,195, filed Jul. 29, 2015, patented as U.S. Pat. No. 10,138,451, which is a national stage application of International Application No PCT/US14/13473, filed Jan. 29, 2014, which claims benefit of U.S. Provisional Application No. 61/849,589, filed Jan. 30, 2013, the entire contents of which applications are hereby incorporated by reference in their entireties.

### STATEMENT REGARDING SEQUENCE LISTING

[0002] The Sequence Listing associated with this application is provided in XML format in lieu of a paper copy and is hereby incorporated by reference into the specification. The name of the XML file containing the Sequence Listing is Reid-Continuation application sequence listing.xml. The XML file is 670 KB, was created on Nov. 28, 2023, and is being submitted electronically via EFS-Web.

### FIELD OF THE INVENTION

[0003] This invention relates to equipment and methods for electroporation and developmental cell activation using electroporation and other methods.

### BACKGROUND OF THE INVENTION

[0004] U.S. Pat. No. 3,598,119 discloses an injection needle that may be guided through an inner lumen of a catheter and a bladder at the distal end of a catheter that may be inflated through another lumen so as to fix the position of the point of the needle.

[0005] U.S. Pat. No. 4,578,061 discloses a catheter featuring an injection needle which is longitudinally movable beyond the distal end of the catheter. A dual chamber system provides for movement of a plunger to extend the injection needle and apply a dose of injectant.

[0006] U.S. Pat. No. 4,578,061 discloses an injection catheter having a longitudinally movable needle which may be extended through a lumen and out of the side wall of the catheter for injecting a blood vessel. The needle is normally retracted into the device in preparation for deployment.

[0007] U.S. Pat. No. 5,244,460 is directed toward a method for inserting a catheter into a coronary artery and injecting into the target tissue, organ or cavity a blood vessel growth promoting peptide via the port of the catheter.

[0008] U.S. Pat. No. 5,419,777 is directed toward an injection needle which protrudes laterally through the side walls of the distal end of the catheter.

[0009] U.S. Pat. No. 5,431,168 discloses a steerable catheter which includes a puller wire for controlling the distal end of the catheter from a control handle mounted proximally.

[0010] U.S. patent application Ser. No. 09/019,453 discloses an injection catheter system for infusing a diagnostic or therapeutic agent into the wall of an organ which includes an electromagnetic sensor disposed within the distal end of the catheter.

[0011] The transcendent challenge for medicine in the 21st century will be replacing damaged, worn-out or genetically-compromised cells. Transcription factors, small RNAs and other cell fate determinants play a vital role in regulating gene expression. It is the particular complement of transcription factors and regulating RNA sequences within an individual cell that determine which cellular programs are active and which are turned off. In this capacity transcription factors, small RNAs and other cell fate determinants play a decisive role in determining and maintaining cellular identity, as well as determining cellular vulnerability.

### SUMMARY OF THE INVENTION

[0012] The present invention relates to equipment and apparatuses and methods suitable for use in electroporation, especially i. electroporation producing developmental activation in a cell leading to repair or renewal, treatment, genetic correction, etc. of a tissue or organ, and especially, ii. electroporation wherein the transfectant is a peptide, protein, nucleic acid, dye or chemical compound. Said transfectants may be either natural or synthetic.

### BRIEF DESCRIPTION OF THE DRAWINGS

[0013] FIGS. 1A-1D illustrate cell culture dishes with reservoirs for electroporation.

[0014] FIG. 1E illustrates an assembly of sample cell culture dishes (number of dishes may vary for example from 1 to 1,600) wherein each has a “reservoir” portion that functions like a typical electroporation cuvette and broader portion (“inspection plane”) which functions like a traditional cell culture plate.

[0015] FIGS. 1F, 1G and 1I illustrate “Dish-in-Dish”, cell culture flask with electroporation reservoir.

[0016] FIG. 1H illustrates “Dish-in-Dish”, cell culture flask with multiple electroporation reservoirs.

[0017] FIG. 1J illustrates “Dish-in-Dish”, cell culture dish with electroporation reservoir.

[0018] FIG. 2A illustrates a catheter style electroporation apparatus suitable for in vivo electroporation with protein and other transfectants.

[0019] FIGS. 2B, 2C illustrate distal ends of catheters suitable for in vivo electroporation, including retractable needle with co-axial electrodes and circular electrode array circumscribing a retractable injection needle.

[0020] FIG. 2D illustrates a loop or circular electrode array which is used in the catheter (shown in FIG. 2C) suitable for in vivo electroporation.

[0021] FIG. 3A is a schematized map of pLenti-SFFV-Oct4-2A-Sox2 vector.

[0022] FIG. 3B is a schematized map of pLenti-pReceiver-Lv113R vector.

[0023] FIG. 3C is a schematized vector map corresponding to the vector sequence of Example 13.

[0024] FIG. 3D shows a non-integrating, Numb and Numblike lentivectors.

[0025] FIGS. 4A-4D illustrate 3T3 cells electroporated at 300V with a varying number of 5 ms pulses in the presence of FITC-conjugated albumin.

[0026] FIGS. 5A-D illustrate PRR+Numb transfected cells form colonies of VSEL-like cells that express pluripotent markers SSEA3 (FIG. 5B) and SSEA4 (FIG. 5D) as assessed by fluorescent immunohistochemistry.

[0027] FIGS. 6A-D illustrate that cells transfected with Oct4, Sox2 and Nanog proteins form colonies of VSEL-like cells that express pluripotent markers SSEA4 (FIG. 6B) and SSEA3 (FIG. 6D) as assessed by fluorescent immunohistochemistry.

[0028] FIGS. 7A and 7B illustrate Murine Cells electroporated with Oct4, Sox2, Nanog and Notch-1 proteins (300V, 70 pulses, 50 ug per protein), or overexpressing the long PRR+Numb isoform, clustered hierarchically in Heatmaps and in Principal Component Analysis (PCA) plots amongst other published, pluripotent ES and iPS cells analyzed using the Affymetrix GeneChip HTA 2.0 chip (GSE53299 and GSE61403).

[0029] FIGS. 8A and 8B illustrate human buccal check cells imaged with brightfield (FIG. 8A) and fluorescent (FIG. 8B) microscopy 48 hours after electroporation (per Koken et al., 1994; 300V, 70 pulses, 5 ms pulses, 100 ms pulse-interval) in the presence of FITC-conjugated albumin.

[0030] FIGS. 9A-9C illustrate cell colonies induced from buccal check cells at 6 days (FIG. 9A and FIG. B) and 46 days (FIG. 9C) after electroporation per Koken et al., (1994).

[0031] FIGS. 10A-10C illustrate that 7 weeks after electroporation, cell colonies induced from buccal check cells using electroporation express pluripotency associated proteins Oct 4 (FIG. 10A), Nanog (FIG. 10B), and Sox2 (FIG. 10C).

[0032] FIGS. 11A-11I illustrate that protein electroporation with Oct4, Sox2 and Nanog produces developmentally-activated, buccal check cells that form colonies and embryoid (rectangles) reactive for Nanog (FIGS. 11A-11C), Sox2 (FIGS. 11D-11F) and Oct4 (FIGS. 11G-11I).

[0033] FIGS. 12A-12C illustrate that protein electroporation with Oct4, Sox2 and Nanog produces developmentally-activated, buccal check that form embryoid composed of VSEL-like cells with positive reactivity for Nanog (FIG. 12A), Sox2 (FIG. 12B) and Oct4 (FIG. 12C).

[0034] FIGS. 13A-13B illustrate that human hepatocyte cells transfected and activated-developmentally with lentivirally-encoded i) PRR+Numb, ii) Oct4/Sox2, or iii) PRR+Numb, Oct4, and Sox2, cluster hierarchically in Heatmaps and in corresponding Principal Component Analysis (PCA) plots amongst other published, pluripotent ES and iPS cells analyzed using the GeneChip Affymetrix Human Genome U133 2.0 Array (GSE76830 and GSE88963).

[0035] FIGS. 14A-14D illustrate pluripotency induction in approximately 3% percent of cells 24 hours cells after protein electroporation with Oct4, Sox2, and Nanog proteins (FIG. 14A and FIG. 14B), and induction in greater than 95% of cells 72 hours after electroporation (FIG. 14C and FIG. 14D), as demonstrated by GFP reporter expression under the control of the c-MYC.

[0036] FIGS. 15A-15D illustrate that thirty days after Oct4/Sox2/Nanog Protein Electroporation of 3T3 Cells, the resulting embryoid bodies showed positive reactivity with anti-Oct4 (FIG. 15A), anti-Nanog (FIG. 15B), anti-Numb (FIG. 15C) and anti-Notch antibodies (FIG. 15D).

[0037] FIGS. 16A-16D illustrate that after electroporation with Oct4, Sox2 and Nanog proteins (50 ug each) in PBS with seventy, 5 ms pulses at 300V, >95% of mouse 3T3 cells were activated to adopt rounded, stem cell morphologies and form small colonies by day six (FIG. 16A), large embryoid bodies day 40 (FIG. 16B and FIG. 16C), and rafts of embryoid, day 57 (FIG. 16D).

[0038] FIG. 17A illustrates that successful construction of the pLenti6-MSGW/EmGFP-Bsd/EF1a/miR-decoy vector was confirmed by Restriction Digestion.

[0039] FIGS. 17B-17C illustrate successful transfection for preparing a viral stock as confirmed by visualizing syncitia formation at 72 hours (FIG. 17B) versus control (FIG. 17C) 293FT cells.

[0040] FIG. 17D is a pLenti6-MSGW/EmGFP-Bsd/EF1a/miR-decoy vector map.

[0041] FIGS. 18A-18F illustrate that combination of long PRR+Numb transfection with Notch and/or Oct4/Sox2/Nanog protein EP (300V, 70 pulses, 5 ms pulse length) produces the claimed effect.

[0042] FIG. 19 illustrates an embryoid bodies 35 days post electroporation.

[0043] FIGS. 20A, 20B illustrate structural comparison between mouse Numblike and its mammalian Numb homologues and construction of integrase-deficient, transgene expressing lentivectors.

[0044] FIGS. 21A-21F illustrate that following in vivo injection of the HIV-EGFP-Numblike transfectant into the lateral ventricle and subsequent electroporation, embryonic (E)15 cells exited the germinal zone, express neuronal Hu C/D, and migrated radially.

[0045] FIGS. 22A-22F illustrate that following in vivo injection of the HIV-EGFP-Numblike transfectant into the lateral ventricle and subsequent electroporation, cortical ventricular zone cells migrate, express beta-tubulin, and differentiate into neurons.

[0046] FIGS. 23A-23C illustrate that electroporation of mouse ventricular zone cells at P0 with HIV-EGFP Numblike versus HIV-EGFP control vector shows cells with divergent cell morphologies (neurons and radial glia)-evidence that numblike acts as a cell fate determinant.

[0047] FIGS. 24A, 24B illustrate that intraventricular injection of the HIV-EGFP-Numblike transfectant followed by in vivo electroporation upregulates Numb expression.

[0048] FIGS. 25A-25C illustrate that in vivo injection of the HIV-EGFP-Numb PTB-/PRR-transfectant followed by electroporation promotes migration and neuronal differentiation.

[0049] FIGS. 26A-26H illustrate that transiently expressed EGFP does not correlate with GLAST protein, a marker of radial glia, but strongly correlates with Numb, TUJ, and DCX markers of neuronal differentiation following HIV-EGFP-Numblike injection and electroporation, in vivo.

[0050] FIGS. 27A-27F illustrate that HIV-EGFP-Numb PRR-/PTB- (FIGS. 27B and 27E) and HIV-EGFP-Numblike (FIGS. 27C and 27F) lentiviruses reduce proliferation and promote differentiation in Ras+, Breast cancer cells versus control.

### DETAILED DESCRIPTION

[0051] The electroporation catheter of the present invention is, in some embodiments, characterized by extendable and retractable needle suitable for injection of an agent or transfectant into the target tissue, organ or cavity tissue.

[0052] In some embodiments, the electroporation catheter further comprises a flexible tubing having proximal and distal ends and at least one lumen.

[0053] The needle of the present invention may be of any suitable medical grade construction. The needle, which in some embodiment may double as electrode, will be electrically isolated from other electrodes and their lead wires.

[0054] In some embodiments, the retractable needle extends beyond the distal end of electrode catheter tubing during injection.

[0055] In some embodiments, the needle is connected to a water-tight tube which is connected proximally to an injection controller.

[0056] In some embodiments, the injection controller is a syringe.

[0057] In some embodiments, the injection controller is a bladder.

[0058] In some embodiments, the injection controller is a mechanical pump allowing finely-controlled and/or programmed control of the injection rate.

[0059] In some embodiments, a radiologically detectable tracer or marker is injected via the needle along with a transfectant of other agent to facilitate monitoring of successful injection and electroporation.

[0060] The needle may be of any size deemed suitable for practice of the invention by the medical interventionalist skilled in the art.

[0061] In some embodiments, the needle features multiple opening through which a transfectant or other agent may be injected.

[0062] In some embodiments, wherein the needle may double as an electrode, it is further connected to a lead wire.

[0063] In some embodiments, the injection needle may function as an electroporation electrode in combination with a second coaxially located electrode.

[0064] In some embodiments, the injection needle may function as an electroporation electrode in combination with multiple coaxially located electrodes.

[0065] In some embodiments, the injection needle may function as an electroporation electrode in combination with a loop electrode, and/or in combination with a circular array of electrodes.

[0066] In some embodiments, the injection needle may function as an electroporation electrode in combination with a circular array of needle electrodes.

[0067] In some embodiments, the injection needle does not double/function as an electroporation electrode, and, instead, coaxially located electrodes perform the electrode function.

[0068] In some embodiments, the injection needle does not double/function as an electroporation electrode, and, instead, a loop electrode, alone or in combination with coaxially located electrodes, performs the electrode function.

[0069] In some embodiments, the injection needle does not double/function as an electroporation electrode, and, instead, the electrodes of a circular array perform the electrode function.

[0070] In some embodiments, the electrodes of the electroporation catheter are retractable electrodes.

[0071] In some embodiments, the retractable electrodes may be extended beyond the distal end of catheter during electroporation.

[0072] In some embodiments, the electrodes are extended to prior to injection to ascertain the catheter is correctly positioned, and may be used to detect a change in impedance.

[0073] In some embodiments, the electrodes and/or needle doubling as an electrode may further be used to detect and/or map electrical activity in a tissue, before injection of an agent or transfectant and electroporation, or after injection or after electroporation.

[0074] In preferred embodiments, the electrodes and/or needle doubling as an electrode are connected electrically to an electrical pulse generator and power supply.

[0075] In some embodiments, the entire catheter system of the present invention is connected to a computer interface and/or computer by which the system is monitored and controlled.

[0076] In some embodiments, the electrodes and/or needle doubling as an electrode may be used to perform irreversible electroporation.

[0077] In some embodiments, a needle hand control is provided at the proximal end of the catheter.

[0078] In some embodiments, injection needle system extends from the distal end section, through the catheter tubing to a needle controller.

[0079] In some embodiments, the injection needle can translocate so that its distal end can extend under the influence of the needle hand control.

[0080] In some embodiments, electrodes are mounted on the distal end of the catheter as coaxially positioned electrodes, loop electrode(s) and/or circular electrodes.

[0081] In some embodiments, multiple electrodes are mounted on the distal end of the catheter as a circular electrode array.

[0082] In some embodiments, an electrode lead wire is electrically connected to the injection needle and to a suitable monitoring apparatus, an electrical pulse generator and a power source.

[0083] In some embodiments, the invention is directed to a method for introducing an agent, especially a therapeutic, drug, transfectant or DAdC population, into the tissue of a patient.

[0084] In some embodiments, the method comprises introducing the distal end of a catheter into or through the patient's body, vasculature, or orifice to reach the target tissue or space, wherein the injection needle is then extended beyond the distal end of the end section and a useful agent, especially a therapeutic, drug, transfectant or developmentally activate cell population, is then injected into the tissue, organ or cavity, optionally followed by reversible electroporation.

[0085] In some embodiments, the method comprises introducing the distal end of a catheter into or through the patient's body, vasculature, or orifice to reach the target tissue or space, wherein the electrodes and/or needle doubling as an electrode are used to perform electroporation.

[0086] In some embodiments, the method comprises introducing the distal end of a catheter into or through the patient's body, vasculature, or orifice to reach the target tissue or space, wherein the electrodes and/or needle doubling as an electrode are used to perform electroporation.

[0087] In some embodiments, the target tissue is a tissue that has suffered ischemic damage and the agent or transfectant or cells of the present invention is capable of mitigating said damage.

[0088] In some embodiments, the tissue is a tissue that is genetically compromised and the agent, transfectant or cells of the present invention is capable of mitigating said compromise.

[0089] In some embodiments, the tissue of the present invention is a tissue in need of regeneration and the agent, transfectant or cells of the present invention is capable of promoting regeneration.

[0090] In some embodiments, the target tissue is a tissue in need of repair and the agent, transfectant or cells of the present invention is capable of promoting said repair.

[0091] In some embodiments, the target tissue is in need of differentiated cellular elements and the agent, transfectant or cells of the invention is capable of promoting or providing said elements.

[0092] In some embodiments, the tissue of the present invention is a tissue featuring abnormal growth and/or proliferation (e.g. cancer) and the agent or transfectant, or cells of the invention is capable of reducing or eliminating said abnormal growth and/or proliferation.

[0093] In some embodiments, the target tissue hypoplastic and the agent, transfectant, or cells of the present invention is capable of promoting growth and/or proliferation.

[0094] In some embodiments, the agent or transfectant is a protein or nucleic acid and transfection is mediated by nanoparticle and/or a transfection mediating reagent, named herein.

[0095] In some embodiments, the agent or transfectant is a chemical compound or extract.

[0096] In some embodiments, a tissue is injected with a developmentally activate cell population, and electroporation is not applied.

[0097] The current invention, therefore, provides a catheter suitable for use for injection of an agent, especially a therapeutic, drug, transfectant or cell population of the present invention, into a target tissue, organ or cavity—with or without electroporation (EP). In some embodiments, in vivo, irreversible electroporation is performed after injection of an agent or transfectant.

[0098] In some embodiment, the catheter of the present invention comprises an catheter tubing having proximal and distal ends, an end section at the distal end of the catheter tubing, and a needle hand control and deflection controller proximal the catheter tubing.

[0099] In some embodiments, the tubing may be of any suitable construction and material so long as the construction and material provide for one or more flexible lumen.

[0100] In some embodiments, the tubing may be of any suitable construction and material providing for one or more substantially, non-compressible lumen.

[0101] In some embodiments, polyurethane, polyether ether ketone, or nylon forms the outer wall. In some embodiments, the outer wall may further comprise a mesh of stainless steel.

[0102] In some embodiments, the catheter's outer diameter no more than 8 French.

[0103] The outer diameter of the catheter's end section is also preferably no greater than 8 French. In some embodiments, the catheter has an inner stiffening tube made of any suitable material. In one embodiment, the inner stiffening tube is constructed from polyimide.

[0104] In a preferred embodiment, the catheter is compatible with a conventional guide sheath.

[0105] In some embodiments, the catheter features a compression coil and puller wire assembly.

[0106] In some embodiments, one or more coaxial electrodes are mounted directly to the distal end of the flexible tubing of the end section.

[0107] In some embodiments, one or more ring electrode is mounted to the end section of the catheter and connected to lead wires.

[0108] In some embodiments, the catheter end section comprises a deflectable segment and an adjustable circle or loop housing an electrode array of variable number.

[0109] In some embodiments, the catheter electrodes are irrigated electrodes and perfusion fluid channels are incorporated in the main body portion, and the control handle.

[0110] In some embodiments, a compression coil surrounds the puller wire from the proximal end of the catheter tubing to the proximal end of the end section.

[0111] In some embodiments, the compression coil is made of stainless steel.

[0112] The ability to derive proliferating, self-renewing, multipotent and pluripotent cell population(s) from otherwise non-pluripotent, non self-renewing cells may have significant positive implications for all fields utilizing cellular therapies. These fields include bone marrow transplantation, transfusion medicine, and gene therapy and enable the production of patient-specific stem cells and other desired cell types. Likewise, the ability to initiate differentiation of cells into neural, muscle, and various other desirable cell populations is and will also be of significant value to medicine and commercial processes involving animals. Accordingly, the present invention provides methods for genetic production and uses of multipotent cell populations, pluripotent cell populations, neuronal cell populations, muscle cell populations, and other desired cell populations such as, for example, HIV resistant cell populations.

[0113] The invention may be used with any suitable cells, including vertebrate cells, and including fish, mammalian, avian, amphibian, and reptilian cells.

[0114] A theoretical basis for the embodiments of the invention is described herein, however, this discussion is not in any way to be considered as binding or limiting on the present invention. Those of skill in the art will understand that the various embodiments of the invention may be practiced regardless of the model used to describe the theoretical underpinnings.

[0115] All patents, patent applications, and publications cited in this application are hereby incorporated by reference herein in their entireties.

[0116] The present invention relates to equipment and apparatuses suitable for use in electroporation, especially electroporation producing developmental activation in a cell, and especially protein electroporation producing developmental activation in a cell.

[0117] The current invention teaches electroporation related equipment for electroporating cells ex vivo, in vitro, or in a tissue or organ in vivo.

[0118] In one part, the present invention teaches a catheter for infusing various agents, e.g. therapeutic or diagnostic agents, into a tissue or an organ, wherein the catheter comprises an injection needle that, in some embodiments, may also serve as an electrode for electroporation, including for protein electroporation.

[0119] It is a proposition of the present invention that the efficient introduction or overexpression of nucleic acids or proteins corresponding to specific transcription factors and small RNAs, alone or in combination with other cell fate determinants (e.g. notch, numb, numblike, various small RNAs, and various specific aptamers, and other cell fate determinants known to the art), enables the interconversion of what have been considered transitory (multipotent, pluripotent, and/or self-renewing) or fixed (differentiated or somatic) cellular phenotypes. The ability to reliably induce developmental activation, phenotypic conversion, or cellular reprogramming allows the production of stem-like cells, replacement cells, tissues, and organs that match individual patients or subjects. In conjunction with gene therapy techniques and cell culture techniques, cell type interconversion also provides for the production of disease-resistant and genetically-repaired cells that are suitable for transplantation.

[0120] The current invention teaches that it is the particular complement of transcription factors within an individual cell that determines which cellular programs are active and which are turned off. In this capacity transcription factors play a decisive role in determining and maintaining cellular identity, as well as determining cellular vulnerability.

[0121] It is a further teaching and proposition of the present invention that the efficient introduction or overexpression of specific transcription factors, alone or in combination with other cell fate determinants, such as regulatory RNAs (e.g. small RNAs) enables the production of transitory (multipotent, pluripotent, and/or self-renewing) or fixed (differentiated or somatic) cellular phenotypes. The ability to reliably developmentally activate, induce or reprogram cells using cell fate determinants allows the production of stem cells, replacement cells, tissues, and organs that match individual patients or subjects. In conjunction with gene therapy techniques and cell culture techniques, cell type interconversion also provides for the production of disease-resistant and genetically-repaired cells that are suitable for transplantation.

[0122] It is an object of this invention to provide various manners of generating developmentally-activated cells (DAdC)-proliferating, self-renewing, multipotent, pluripotent and/or “pluripotent-like” cell population(s), as well as other desirable cell populations, from either dividing or non-dividing cells without requisite use of oncogenes. Differentiating cell populations (aka differentiating somatic cell populations) comprise cells expressing some, but not all markers associated with specific cell type categorization. It is disclosed herein that appropriate cell fate determinants (protein or nucleic acid) in combination with other transgenes (or their corresponding proteins), especially transcription factors and small RNAs, enables the production of dividing, pluripotent, or pluripotent-like cell populations or differentiating cell populations. Moreover, the methods (including the vectors) of the present invention may be used to produce genetic modification (e.g. expression of gene products deficient in the patient) and to transiently or permanently induce proliferation, self-renewal, or stem/progenitor cell behavior in endogenous cells in vivo, particularly those cells found in tissues which normally do not show or no longer show such behavior. Finally, the methods (and the vectors) of the present invention may be used block proliferation, self-renewal, or stem/progenitor cell behavior in cells aberrantly displaying such behavior (e.g. cancer cells).

[0123] Likewise, the current invention provides for production, using various, including commercially available means, of all manner of vectors known to the art, such that they comprise and allow expression of one or more members of the transcription factors and other cell fate determinants described herein for activating, inducing or reprogramming a cell to a desired type.

[0124] It is also an object of the present invention to provide therapeutic vectors and cells capable of expressing beneficial sequences (such as small RNAs or synthetic oligonucleotide sequences, or sequences coding for proteins) predicted to attenuate disease processes. For example, the current invention discloses the use of synthetic oligonucleotides to reduce gene expression critical HIV and other immunodeficiency virus infection, propagation and spread.

### Equipment and Apparatuses Suitable for Use in Electroporation

[0125] The present invention relates in part to equipment and apparatuses suitable for use in electroporation, especially electroporation producing developmental activation in a cell, or that may be used in conjunction with cells activated developmentally according to the methods described herein.

[0126] An electroporator uses a high-voltage electrical discharge to introduce a transfectant or transfectants into a cell. This method, commonly referred to as electroporation, typically involves suspending selected, target cells in a phosphate-buffered saline (PBS) solution to which, a nucleic acid, protein, dye, or other transfectant is also added. Electroporation can be used for both transient and stable transfection. Most commonly, the cell and transfectant suspension are transferred to an electroporation cuvette. Connected to a power supply, an electrical pulse generator subjects the cells in the cuvette to a high-voltage electrical pulse of defined magnitude and length. The high-voltage pulses cause the various membranes of the cell to lose their normal integrity to take up and/or overexpress the introduced, exogenous transfectant. The electric potential across the cell membrane drives charged molecules across the membrane through the temporary pores induced in the cell membrane, in a manner similar to electrophoresis (Shigekawa and Dower, 1988). Following electroporation, the cells are often allowed to recover briefly before they are placed in normal (non-selecting) cell growth medium. Factors that can be varied to optimize electroporation effectiveness are discussed in introduction to Section I, and protein expression strategies are discussed in Chapter 16 of Curr Protoc Mol Biol. 2003 May; doi: 10.1002/0471142727.mb0903s62.

[0127] The amount of voltage and current required in transfection procedures depends upon the cell type and the nature of the transfectant, A transfection high-voltage controller is taught by U.S. Pat. No. 4,750,100. The commonly employed practice of transferring cells from a first cell culture apparatus to a cuvette and then to another cell culture apparatus is attendant with contamination and infectious risks. The Neon® Transfection System is a second-generation transfection system that uses an electronic pipette as an electroporation chamber, but Neon still requires that the electroporation procedure be carried out within a sterile environment, e.g. a restrictive, cell culture hood, and does not completely eliminate the transfer related contamination and infectious risks. In contrast, the present invention provides a combined electroporation chamber/cell culture apparatus allowing electroporation and cell culture to be accomplished in the same cell culture apparatus-obviating the need for transfer from an electroporation chamber to a separate cell culture apparatus.

[0128] The novel culturing apparatus (assembly) of the present invention may be termed a cell culture dish. More particularly, the present invention is a “combined cell culture dish” or “dish-in-dish” apparatus comprising at least one smaller cell culture dish fixedly positioned within a larger cell culture dish, and the number of such fixated cell culture dishes can include a multiple number of fixated cell culture compartments within one another, either concentric or eccentric, in any number of geometric shapes, and without limitation to the number of compartments included. An alternate embodiment of this invention can include a plurality of cell culture dishes juxtaposed side-by-side having common interior well walls, and the well walls may or may not be different in height depending on the application. The combined cell culture dish differs from the prior art, in part, because the walls of said combined compartments may be of different heights and made from any combination of transparent and non-transparent materials that will allow juxtaposing cultures to grow simultaneously.

[0129] In some embodiments, the cell culture compartment communicating with a reservoir suitable for electroporation is a cell culture bag.

[0130] In some embodiments, the cell culture compartment communicating with a reservoir suitable for electroporation is a bioreactor of variable dimensions and shapes.

[0131] Accordingly, one skilled in the art will recognize that the cell culture compartment may be of any construction, shape or size, so long as it may be made to communicate with a second compartment of variable size and construction suitable for electroporation.

[0132] The combined cell culture/electroporation apparatus of the present invention may or may not be fitted with single or multiple covers and may or may not be stacked. A particular embodiment of the arrangement described herein comprises one or more smaller dish or compartment (aka reservoir or reservoirs) located inferiorly, within, or adjacent to a larger cell culture dish with which it can communicate, and wherein said smaller dish (which may have dimensions akin to those of standard electroporation cuvettes) comprises electrodes or electrode plates that enable electroporation. In some embodiments, a wall of low height (aka a lip) will separate the smaller dish/compartment (e.g. the cuvette-like reservoir) from the larger dish/compartment. The low wall or lip and/or funnel demarcates and surrounds the reservoir while also demarcating the space by which these two cell cultures may communicate (e.g. if a sufficient volume of medium is added and the cuvette-like reservoir overflows). Such an arrangement of compartments allows cells to undergo electroporation and incubate in a single cell culture apparatus-obviating the need to transfer cells from a first apparatus (e.g., a first cell culture dish) to a second apparatus (e.g., an electroporation cuvette), as well as obviating the need to transfer the cells from the second electroporation chamber apparatus to a third apparatus (e.g., a second cell culture dish) for further incubation; accordingly, this particular arrangement provides a “closed system” that reduces labor, costs of materials, and infectious/contamination risks.

[0133] The main compartment and the reservoir may be of various sizes and dimensions.

[0134] In some embodiments, when the design features a flask-like compartment, the flask like compartment will preferably approximate standard flask dimensions while the reservoir may approximate standard electroporation cuvette sizes.

[0135] In one embodiment, the flask, plate, dish, bag, etc. cell compartment takes the width of an embedded cuvette-sized reservoir.

[0136] In one embodiment, the reservoirs are detachable and snap onto or slide into the larger main dish, plate or flask.

[0137] Likewise, the spatial relationship between the multiple compartments taught herein allows the electroporation procedure to be performed in a non-sterile environment, e.g. outside of the tissue culture hood, at the bench. Currently, the size of a tissue culture hood limits the size of the electroporation apparatus. When performed outside of the tissue culture hood using the cell culture dishes, plates and flasks equipped with one or more electroporation reservoirs, as taught herein, the electroporation apparatus may be of unlimited size and can be used to perform electroporation of multiple (up to hundreds or thousands of) cell cultures simultaneously, thereby enabling higher throughput. Accordingly, a parallel array of electrodes suitable for high throughput, parallel electroporation is also described herein. Such an array may take the form of a slot or slots containing multiple electrode pairs spaced at distances accommodating the dimensions and spacings of the reservoirs, or a block with multiple wells, each well containing one or more electrode pairs and having dimensions accommodating the one or more reservoir portions of the “reservoir-in-dish” or “reservoir in flask”, etc., cell culture dishes, plates, flasks, bags, bioreactors, etc.

[0138] In general, the cell culture/electroporation apparatus of the present invention comprises two or more compartments which create a central compartment and one or more peripheral compartments which surround the central compartment. Said central and peripheral compartments may take the form of any shape, or any geometrical relationship including, but not limited to cylindrical, square, pentagonal, or hexagonal. The material used to construct said petri dish may include, but may not be limited to any non media-permeable form of glass, plastic or metal or combination thereof, which will sustain culture growth and permit observation and recording of said culture growth, differentiation and/or signal transduction. Separated areas created by utilizing the central compartment and one or more peripheral compartments may be geometrically concentric or eccentric.

[0139] The cell culture/electroporation apparatus of the present invention may comprise one or more compartments within a compartment or may be constructed of a single compartment with a flat well bottom having one or more sets of walls that extend from said well bottom forming one or more separate enclosures having the same geometric shape or a variety of geometric shapes.

[0140] In some embodiments, the walls of the combined cell culture/electroporation apparatus are arranged in a manner that allows communication of cells and/or media between and amongst the separate compartments when a sufficient volume of medium is present. For example, one compartment may be filled with cells and/or medium to a certain height, wherein the medium and/or cells remain restricted, confined or localized to a first compartment, and wherein further addition of cells and/or medium allows the contents of the first compartment to ascend above or spill over walls or lips demarcating one compartment from a second compartment, or to spread into a second compartment communicating with the first.

### Definitions

[0141] As discussed herein, “DNA” refers to deoxyribonucleic acid and “RNA” refers to ribonucleic acid. As discussed herein, “cDNA” refers to complementary DNA; “mRNA” refers to messenger RNA; “siRNA” refers to small interfering RNA; “shRNA” refers to small hairpin RNA; “miRNA” refers to microRNA, such as single-stranded RNA molecules, typically about 20-30 nucleotides in length, which may regulate gene expression; “decoy” and “decoy RNA” and “RNA decoy” refer to an RNA molecule that mimics the natural binding domain for a ligand.

[0142] As used herein, the meaning of the term “ameliorating” includes lessening an effect, or reducing damage, or minimizing the effect or impact of an action, activity, or function, and includes, for example, lessening the deleterious effects of a disease or condition.

[0143] As used herein, the meaning of the term “retarding” includes slowing or lessening the progress of an effect or action, and includes, e.g., slowing the progress of disease, slowing the rate of infection, or otherwise slowing or reducing the advance or progress of a disease or condition.

[0144] As used herein, an “inducing agent” is an agent that aids or is alone effective to promote an action.

[0145] For example, an exogenous agent that affects a promoter, e.g., by initiating or enhancing its activity, and so affects expression of a gene under control of the promoter, may be termed an inducing agent. For example, tetracycline may be used as an inducing agent; and doxycycline may be used as an inducing agent.

[0146] A nucleic acid sequence (e.g., a nucleic acid sequence encoding a polypeptide) is termed “operably linked” to another nucleic acid sequence (e.g., a promoter) when the first nucleic acid sequence is placed in a functional relationship with the second nucleic acid sequence. For example, a promoter is operably linked to a coding sequence if the promoter affects the transcription or expression of the coding sequence. As used herein, the term “driven by” refers to a gene or coding sequence that is operably linked to a promoter sequence, and that the promoter sequence affects the transcription or expression of the coding sequence.

[0147] As used herein, a “marker” is a molecule that is detectable, or codes for a detectable molecule, or acts on other molecules so that the presence of the marker is detectable. A “marker protein” or “marker polypeptide” is a protein or polypeptide that is detectable in a laboratory or clinical environment, and, in embodiments, may be detectable by eye. A “marker gene” encodes a marker protein or marker polypeptide.

[0148] As used herein, “HIV” refers to human immunodeficiency virus, and includes variants such as, e.g., HIV-1, HIV-2. Other immunodeficiency viruses include simian immunodeficiency virus (SIV) and feline immunodeficiency virus (FIV). Enzymes related to HIV may be termed “HIV enzymes” and include, for example, \integrase, protease, reverse transcriptase, and transactivating regulatory protein (TAT).

[0149] Infection by HIV is believed to involve receptors termed “HIV receptors.” There may be multiple such receptors, some of which may be termed “HIV co-receptors.” As discussed herein, HIV co-receptors include CXCR4 and CCR5.

[0150] Developmentally-active cells (DAC), as defined herein, represent a broad category of cells that are either i. “transitory-type cells” typically showing high potency, such as embryonic stem (ES) cells, very small embryonic-like (VSEL) cells, pluripotent stem cells, multipotent stem/progenitor cells), or ii. “fixed-type” cell types, which typically have low or limited potency, (e.g.

[0151] differentiating somatic cell types capable of further differentiation and/or integration in vivo-usually over the course of an organism's development).

[0152] While “transitory” DAC tend, in nature, to divide and/or show self-renewal, “fixed” DAC are more often post-mitotic and usually do not self-renew. Instead, fixed DAC typically show the emergence of some characteristics associated with a terminally-differentiated cell of its type.

[0153] Nevertheless, both “transitory” and “fixed” cells have uses and potential uses in medicine (especially regenerative medicine, transplantation medicine, veterinary medicine, animal husbandry, drug-discovery, drug-testing, gene therapy, tissue-engineering, organ production, and biological modeling), laboratory-based food production, and various other industries.

[0154] As a category, developmentally-active cells (DAC) include cells that inherently show features of developmentally active cells, as well as cells that have been “activated”, aka “made”, “forced”, “induced, or “reprogrammed” to acquire such characteristics; this latter subset of developmentally active cells herein defined as, “developmentally-activated cells (DAdC)”.

[0155] Writing with respect to with respect to B cells and T cells of the immune system, Kolanus et al., (1992) observed that a “developmentally activated cell state” results from “a change in transcriptional potential”. Likewise, as used herein, “developmentally-activated cells” (DAdC) include cells which some skilled in the art term, “reprogrammed cells”, “partially-reprogrammed cells”, “induced pluripotent cells”, “directly reprogrammed cells”, “indirectly-reprogrammed cells, etc., e.g. induced pluripotent cells, induced multipotent cells, induced hematopoietic stem/progenitor cells, induced neurons, induced cardiac cells, induced skeletal muscle cells, induced cartilage cells, induced hematopoietic cells, induced liver cells, induced pancreatic beta cells, etc.)—as such cells show a change in transcriptional potential relative to untreated cells. As used herein, terms of art, such as “pluripotent”, “multipotent”, “self-renewing”, “differentiating”, “cardiac”, “muscle”, “neuron”, “progenitor”, “stem cell”, “osteoblast”, “chondrocyte”, etc. are understood to refer either to i. cells produced in nature (natural cells) of a type, or to ii. like cells produced through the methods described herein-cells displaying some, but not necessarily all, features marking the natural cells denoted by these terms.

[0156] For example, as used herein, a “pluripotent cell” is one capable of forming embryoid in vitro and that expresses some markers of pluripotency, however it need not be capable of forming teratomas in vivo; accordingly, as used herein, “pluripotent cells” need not meet all criteria for pluripotency commonly applied by some skilled in the art.

[0157] Conversely, some cells recognized as “pluripotent” by those skilled in the art are considered herein to represent inherently, developmentally-active cell types, e.g. embryonic stem cells (ES) cells, Very Small Embryonic-Like (VSEL) stem cells, mouse embryonic stem cells (mES), etc.

[0158] In regard to such cells, Kim et al. (2014), write,
[0159] “Pluripotent stem cells (PSCs) have been considered as the most important cells in regenerative medicine as they are able to differentiate into all types of cells in the human body. PSCs have been established from several sources of embryo tissue or by reprogramming of terminally differentiated adult tissue by transduction of so-called Yamanaka factors (Oct4, Sox2, Klf4, and cMyc). Interestingly, accumulating evidence has demonstrated the residence of PSCs in adult tissue and with the ability to differentiate into multiple types of tissue-committed stem cells (TCSCs). We also recently demonstrated that a population of pluripotent Oct4(+), SSEA-1(+), Sca-1(+), Lin(−), CD45(−) very small embryonic-like stem cells (VSELs) resides in the adult murine bone marrow (BM) and in other murine tissue. These very small (˜3-6 um) cells express pluripotent markers such as Oct4, Nanog, and SSEA-1. VSELs could be specified into several tissue-residing TCSCs in response to tissue/organ injury, and thus suggesting that these cells have a physiological role in the rejuvenation of a pool of TCSCs under steady-state conditions. In this review article, we discuss the molecular nature of the rare population of VSELs which have a crucial role in regulating the pluripotency, proliferation, differentiation, and aging of these cells (Kim Y, Jeong J, Kang H, Lim J, Heo J, Ratajczak J, Ratajczak M Z, Shin D M. The molecular nature of very small embryonic-like stem cells in adult tissues. Int J Stem Cells. 2014 November; 7(2):55-62; https://www.ncbi.nlm.nih.gov/pubmed/25473442).”

[0160] It follows that the pluripotent, VSEL cells and tissue-committed stem cells TCSC's of Kim et al., represent cell types included in the category of developmentally active cells (DAC).

[0161] Pluripotent cells are most commonly defined by their ability to produce cell types reflecting all three embryonic germ layers of a developing gastrula (ectoderm, endoderm and mesoderm). This ability to form all three germ layers relates both to teratoma formation in vivo and embryoid formation in vitro. As Lin and Chen (2014) write,
[0162] “Embryoid bodies (EB) are the three-dimensional aggregates formed in suspension
   [0163] by pluripotent stem cells (PSC), including embryonic stem cells (ESC) and induced pluripotent stem cells (iPSC).”
[0164] Pettinato et al. (2015) further describe embryoid bodies as,
   [0165] “three-dimensional (3D) hPSC [human pluripotent stem cell] aggregates that can differentiate into cells of all three germ layers (endoderm, ectoderm, and mesoderm) [3]. Many events in the in vitro lineage-specific differentiation process within the EBs recapitulate those seen in vivo in the developing embryo [6], which justifies the uses of EBs as a model system to simulate the in vivo differentiation of hPSCs under in vitro culture conditions, and mechanistically examine hPSC differentiation programs/lineage commitment during embryogenesis as an alternative to the whole embryo approach [7]. In addition, in vitro formed EBs have opened access to early precursor cell populations that are not accessible in vivo [8]. EBs have been shown to effectively initiate lineage-specific differentiation of hPSCs toward many lineages, such as cardiac [9], neural [10,11], hematopoietic [12], and pancreatic ß cells [13].”

[0166] In part, the current invention is directed to the production of “transitory type” developmentally-activated cells (DAdC) that display many features associated with pluripotent, multipotent, and/or self-renewing cells, e.g. the capacity to form embryoid (aka embryoid bodies) when cultured in vitro. Embryoid formation is a behavior those skilled in the art often associate exclusively with pluripotent cells.

[0167] As used herein, embryoid formation by cells “developmentally-activated” according to methods described herein indicates that these newly, developmentally-activated cells (DAdC) are at least “pluripotent-like” and “VSEL-like”, if not fully pluripotent. Thus, the current invention is directed, in part, to the production of cells considered, herein, to be “pluripotent-like”, “VSEL-like”, “multipotent-like”, and/or “self-renewing-like” cells. In part, then, the current invention is directed, in part, to the production of cells with increased potency.

[0168] Teratomas contain cells from the three germ layers: ectoderm, mesoderm, and endoderm. Teratoma formation is, however, also associated with carcinogenicity. Some skilled in the art may consider that a cell cannot be termed a “pluripotent” cell unless it forms a teratoma when injected in vivo, even if this tendency to tumorigenesis is considered highly undesirable in cells intended for clinical use, especially in regenerative medicine.

[0169] The developmentally-activated cells produced according to the methods taught herein need not form teratomas in order to meet the criteria of “transitory-type, developmentally activated cells (DAdC)”. In contrast, the transitory DAdC produced according to the methods described herein, show many other desirable characteristics associated with pluripotency, such as small size, expression of pluripotent markers such as SSEA3/SSEA4, Oct4, Nanog, Sox2, as well as colony formation and embryoid formation, and therefore such transitory developmentally activated cells (DAdC) are termed “pluripotent” and/or “pluripotent-like”, herein.

[0170] Similarly, the current invention is directed in part, to the production of “differentiating cells” (aka differentiating somatic cells, aka somatic differentiating cells) that display some, but not necessarily all, cell type specific markers associated with the desired cell type. Those skilled in the art may differ somewhat as to the criteria for defining a pluripotent cell as well as differentiating and/or differentiated cell types. As there exists no universally accepted terminology for cells induced or activated to differentiating somatic cell types, the applicants refer to various desired, differentiating cell types producible by the methods described herein as cardiac cells, neurons, chondrocytes, cartilage cells, bone cells, hepatocytes, etc.; however these terms, when used herein also refer to “cardiac-like cells”, “neuron-like cells”, “chondrocyte-like cells”, “cartilage-like cells”, “bone-like cells”, “hepatocyte-like cells”, etc.

[0171] Thus, the criteria for defining a desired cell type or cell potency taught herein may not coincide precisely or overlap entirely with the various criteria taught by others skilled in the art for defining a cell type or a cell potency, and the invention is therefore not bound by such various definitions. Instead, the current invention is aimed at producing cells displaying certain desirable features, characteristics and behaviors which commend them for the various and specific uses taught herein.

[0172] The induced pluripotent stem cells of Takahashi and Yamanaka, which were generated, in part, using oncogenes c-myc and klf4, were able to form teratomas when injected in vivo. Likewise, when Takahashi and Yamanaka produced embryos from these induced pluripotent stem cells, a large percentage of the resulting animals developed tumors postnatally (Takahashi and Yamanaka, 2006; Takahashi et al., 2007). Thus, teratoma formation and carcinogenicity are features associated with some iPSCs, but are features that some skilled in the art may consider undesirable with respect to providing sources of replacement cells, cells for transplantation, cells for gene therapy, cells for tissue engineering, and cells for various other clinical uses.

[0173] In contrast, the transitory, pluripotent and pluripotent-like, developmentally-activated cells (DAdC) produced according to the methods taught herein 1. display colony formation, 2. Form embryoid, 3. Express various genes and proteins associated with pluripotency, 4. cluster with ES and iPS cells in hierarchical cluster analysis based on their gene expression (e.g. global gene expression profile), 5. cluster with ES and iPS cells in Principal Component Analysis (PCA) plots based on their gene expression (e.g. global gene expression profile), but 6. may fail to demonstrate the teratoma formation and the carcinogenicity frequently associated with ES cell lines and induced pluripotent stem cells.

[0174] Developmentally activated cells (DAdC), may be recognized and defined, for example, by i. gene expression analysis (e.g. by Reactome overrepresentation analysis using hypergeometric distribution) that reveals overrepresentation (or enrichment) of genes associated with certain cellular pathways, especially the Cell Cycle pathways and the Developmental Biology pathways especially the Transcriptional regulation of pluripotency sub pathway, the Axon guidance sub pathway; the Myogenesis sub pathway, the Signaling by Nodal sub pathway; the Gastrulation sub pathway; the Activation of Hox genes sub pathway, the Beta cell development sub pathway, and the Transcriptional regulation of white adipocyte differentiation sub pathway (for “transitory” type developmentally activated cells), whereas the Developmental Biology pathways, Gene Expression (Transcription) pathways, and Signal Transduction pathways are overrepresented or enriched in Reactome analyses for “fixed” type, developmentally-activated cells (DAdC).

[0175] Such enriched gene expression (as demonstrated by Reactome analysis) is consistent with the adaptability of DAdCs as a source of stem-like cells, replacement cells, cells suitable for gene therapy and tissue engineering, and cells differentiable to various types (according to the methods disclosed herein, for example, multipotent and pluripotent cells.

[0176] The developmentally-activated cells (DAdC) of the present invention also typically display ii. microscopically-visible, induced changes in cell behavior related to colony formation, embryoid formation and cell size. Likewise, iii. immunohistochemistry may reveal the “transitory” developmentally activated cells as expressing multiple markers commonly associated with pluripotency, such as such as Oct4, Nanog, c-Myc, Notch, SSEA3/4; and TRA-1-81; while “fixed” type developmentally-activated cells will show some markers of differentiating or terminally differentiated cells.

[0177] As described herein, DAdC can be produced by various methods described in the parent application including the use of nucleic acids, e.g. DNA, RNA, and protein; use of miRNA aptamers, and chemical methods are also compatible with the invention.

[0178] As described in the parent application, various means of detecting, monitoring, and demonstrating induced cellular phenotype include gene reporter assays (e.g. performed with a reporter construct) wherein a reporter gene's expression (e.g. an antibiotic resistance gene or fluorescent reporter gene) is linked to the promoter of a gene upregulated in DACs (e.g. c-Myc, Nanog, Oct4, DCX, etc.), as well as other assays described herein.

[0179] However, as the term is used herein, developmentally-activated cells or DAdC need not satisfy all criteria of pluripotency to be recognized as DAdC in the current invention, and therefore may not be pluripotent in the opinions of some skilled in the art, even if they do display desirable characteristics such as very small size, embryoid formation in vitro, and pluripotency marker expression, and other features that some skilled in the art consider tantamount to pluripotency;

[0180] therefore to the extent they are similar to and display features overlapping with cells which have been commonly or unambiguously recognized as pluripotent, some DAdC may be considered herein and by some skilled in the art to be “pluripotent-like”, “ES-like” or even “VSEL-like”. Accordingly, and to avoid confusion, the term, developmentally-activated cell (DAdC) is applied herein and is defined by many features these cells display morphologically, microscopically, and immuno-histologically, as well as according to their pattern of gene expression (transcriptome), their reactome, their utility, and many of their potential uses.

[0181] It should be understood that a developmentally-activated cell (DAdC) may be one caused to display some features consistent with either “transitory” (pluripotent-like, multipotent-like, and/or self-renewing cells) or “fixed” (somatic-like, differentiated-like or differentiating-like) cellular phenotypes, as described herein, and that the present invention enables the production and interconversion of these cells by efficient introduction or overexpression of nucleic acids or proteins corresponding to specific transcription factors, cell fate determinants, small RNAs, and/or aptamers, or by chemical and/or physical means, either in vivo or in vitro, in the presence or absence of specialized cell culture conditions.

[0182] By the same token, while terms for somatic, differentiated cells such as “cardiac cell”, “neuron”, “liver”, “chondrocyte”, “osteoblast”, “T cell”, “beta cell”, etc. appear herein as desirable cells producible by the methods described herein, such terms are used, herein, to describe “developmentally-activated cells” (DAdC) that are similar to corresponding cells (expressing certain cell type specific markers), i.e. cardiac-like cells, neuron-like cells, liver-like cells, chondrocyte-like cells, osteoblast-like cells, T-like cells, beta-like cells, etc. Accordingly, developmentally-activated cells (DAdC) which are of the “fixed type” i. display some but usually not all markers of the desired, cell type (as assessed by Reactome, transcriptome, gene expression and/or protein expression assays), ii. are capable of survival, further differentiation and/or integration in vivo, and iii. need not meet all criteria that those skilled in the art may sometimes apply to the mature phenotype that the DAdC approximate.

[0183] Examples of published studies affirming the utility of transcription factors taught in the parent application with respect to the production of cells showing markers consistent with specific somatic phenotypes include Zhou et al. (2008); Ieda et al. (2010); Szabo et al. (2010); Vierbuchen et al. (2010); Addis et al., (2011); Huang et al., (2011); Kim et al., (2011); Pfisterer et al., (2011); Caiazzo et al. (2011); Liu et al. (2012); Outani et al., (2013); Najm et al., (2013); Mong et al., (2014); Yamamoto, et al., (2015); Xu et al., (2016); Sun et al., (2016); Vadodaria et al., (2016); Ji et al., (2016); Lee et al., (2017); Duran et al., (2018); Hirai et al., (2018); Kogut et al., (2018); McGrath et al., (2018); Stone et al., (2019); Huang et al., (2019); Lin et al., (2019); Sadahiro et al. (2019); Pereira et al., (2019a); and Kandasamy et al. (2019); it follows that the transcription factors and other cell fate determinants taught by these publications are practicable in and covered by the present invention. See also, Wazan et al. (2019), Aydin and Mazzoni (2019), and Pereira et al., (2019b), etc., for reviews.

[0184] It is taught herein that any protein, nucleic acid, or other factor known to those skilled in the art as capable of successfully activating, inducing or reprogramming a cell, either directly or indirectly (Srivastava and DeWitt, 2016; Seo et al., 2017; Fan et al., 2018; Kogut et al., 2018; McGrath et al., 2018; and Aydin and Mazzoni; 2019) may be applied by electroporation (in vivo or in vitro) to achieve superior reprogramming characterized by greater speed, greater efficiency and/or greater safety than demonstrated with previously taught methods. Sce https://www.harvardapparatus.com/media/harvard/pdf/2018_BTX_Catalog.pdf.

[0185] It should be understood that “transitory” type DAdC can also serve as selected cells and be converted to “fixed” DAdC according to the methods described herein, as well as according to methods published elsewhere and known to the art for converting pluripotent, multipotent, or pluripotent-like cells to various differentiated cell types.

[0186] As was the case in the parent application, while some portions of the text herein refer either only to “introduction” or only to “overexpression”, it is to be understood that causing a cell to overexpress a gene has, in the context of the present invention, the same effect as introducing said gene or corresponding RNA or corresponding protein into said cell; and accordingly, the associated methods for introducing or overexpressing are used interchangeably herein.

[0187] A number of small RNAs are suitable and compatible with use in the invention and include small RNAs useful for achieving proliferating, self-renewing, pluripotent, and/or pluripotent-like cells; these small RNAs include one or more selected from the miR-302/367 cluster small RNAs (miR-302a, miR-302b, miR-302c, miR-302d, miR-367), human miR-371-373 cluster small RNAs (miR-371, miR-372, miR-373), miR-17-92, C19MC cluster members, miR-133b, miR 200a, miR 23a, and miR 743b-5p, miR-187, miR-299-3p, miR-499-5p, miR-628-5p, miR-888, let-7 (let-7-b,c,f,g), miR-30 (miR-30-a-c), the mouse miR-290-295 cluster small RNAs (miR-290, miR-291a-3p, miR-291b, miR-292, miR-294, miR-295, miR-29, miR-296, miR-106a cluster, miR-93 and other pluripotency associated small RNAs known to the art, as such small RNAs can be used in conjunction with other cell fate determinants taught herein or alone. Use of RNA and proteins, which do not integrate into the host's genome, may be considered as safer approach to developmental activation/pluripotency induction/cell reprogramming, as compared to other methods that pose the risk of genomic integration. Such vectors are considered to be non-integrating and/or episomal vectors.

[0188] Accordingly, use of chemicals, compounds, extracts and drugs that induce expression of said small RNAs and other cell fate determinants is likewise suitable and compatible with the present invention-especially those chemicals, compounds, extracts and drugs taught in the priority documents associated with the present invention.

### Studies Relevant to Protein Transfectants and Distinguishing the Electroporation Method

[0189] Although some studies (Kim et al. 2009; Zhou et al. 2009) have reported that pluripotent cells could not be produced using a single application of cell penetrating proteins corresponding to pluripotency inducing factors, the current invention, in part, teaches the one-time application of native or recombinant protein transcription factors and/or protein cell fate determinants for the production of developmentally activated cells, including pluripotent-like cells, pluripotent cells, and/or self-renewing cells, as well as differentiating cells that express one or more cell type specific markers consistent with a desired cell type.

[0190] Based on the studies of Kim et al. 2009 and Zhou et al. 2009, many have concluded that cell reprogramming, direct reprogramming, pluripotency induction, or developmental activation cannot be achieved using proteins. They surmise or conclude further that proteins introduced to cells for that purpose are too quickly degraded within the cells, consistent with their short half-lives in cells under normal conditions.

[0191] For example, Seo et al. (2017) write, “Cell-penetrating peptide-based reprogramming might be a safe way to induce reprogramming; however, its low efficiency compared with other methods is a significant concern. The main problem is the poor stability of the recombinant proteins and following endocytic uptake”.

[0192] Dey et al., (2017) make similar observations to Seo with regard to the deficiencies associated with CPP-mediated protein delivery, stating,
[0193] “Presence of CPPs in reprogramming proteins is known to interfere with proper folding inside the cells and thereby decreasing the biological activity . . . endosomal entrapment is also a common barrier and is a major challenge in efficient delivery of CPP linked molecular cargo . . . . In a cell reprogramming paradigm to generate iPS cells via CPP-mediated recombinant protein transduction, reports also show that misfolded CPP-fused recombinant reprogramming proteins after endosomal release gets localized to cytoplasm and/or have a peri-nuclear region as observed in immunostained images [11,35,44,45,47-52]. Due to this, they are unable to enter the nucleus to activate downstream target genes. Nevertheless, a small amount of the biologically active recombinant transcription factors enters the nucleus and binds to its target genes to activate the cell reprogramming machinery.”

[0194] On the other hand, Bekei (2013), having carefully compared the CPP-mediated protein delivery, EP-mediated protein delivery and SLO-mediated protein delivery methods), and concluded that Electroporation-mediated protein delivery is distinct from and superior to the CPP-mediated protein delivery employed by Kim et al., (2009) and Zhou et al (2009), as well as to the SLO-mediated protein delivery utilized by Taranger et al., (2005).

[0195] Bekei teaches that, “this [electroporation] method provides two main advantages over CPP- and SLO-mediated protein delivery. First, it does not require any forms of chemical modifications to proteins that are to be delivered and, second, it works without having to treat cells with potentially harmful toxins that generally lower cell viability.”

[0196] Bekei, also notes that,
[0197] “CPP-mediated protein delivery approaches have to overcome significant obstacles. First, the uptake efficiencies of CPP-cargo constructs are highly dependent on the choice of the CPP sequence and on the combination of CPP/cargo proteins. Membrane compositions of targeted host cells additionally affect the individual uptake efficiencies and these properties need to be considered when devising a CPP-mediated delivery experiment. Second, even if optimal combinations of CPP/cargo sequences have been found for a particular cell line that is to be targeted, efficient release from endocytotic vesicles has to be achieved.”

[0198] Consequently, in the words of Bekei, “Results demonstrate that low transduction efficiencies, high cell line dependences and vesicular-like intracellular distributions strongly limited the suitability of CPP-mediated protein delivery attempts.”

[0199] In contrast, Bekei reports superior results from electroporation (EP)-mediated protein delivery,
[0200] “This [protein electroporation (EP)] method proved to be superior to CPP-, and toxin-mediated delivery protocols, as outlined in the first half of the thesis. Transduction efficiencies, cell viabilities and intracellular distributions of two model proteins, human alpha Synuclein (Syn) and the BI domain of Protein G (GB1) were comparatively analyzed in different mammalian cell types and found to be generally higher using the EP-mediated delivery approach.”

[0201] Most notably, Bekei makes the critical observation that,
[0202] “Although SLO- and EP-procedures yielded comparable transduction efficiencies at low applied protein concentrations, EP clearly outperformed the SLO approach at higher protein concentrations, because it enabled the linear delivery of increasing concentrations of exogenous proteins, with high correlations in intracellular cellular protein levels.”

[0203] Thus, the work of Bekei (2013) makes it clear that the results of CPP-mediated protein delivery cannot be extrapolated or generally applied to other distinct, protein delivery methods, and in particular, should not be generalized to electroporation-mediated protein delivery.

[0204] Bekei further contrasts Cell Penetrating Peptides (CPP) with electroporation-mediated delivery and SLO-mediated Permeabilization, stating,
[0205] “If one were to design an ideal method for intracellular sample delivery into mammalian cells, what needed this method to be able to do? First, it ought to be generally applicable to many different cell lines and proteins, and therefore, the uptake mechanism should preferably not require specific cell-surface receptor interactions of the protein that is to be delivered into these cells. Second, the method should be suitable to transduce ‘native’ proteins, without requirements for engineered protein tags, targeting sequences, or other chemical extensions that are necessary for cellular protein uptake. Such extensions and modifications will ultimately distort the structural and functional features of the protein. Third, the method should not require any treatment of cells with toxic compounds, which decrease cell viability and signal the activation of damage response pathways. I therefore investigated the suitability of yet a third delivery approach: protein electroporation (EP). EP fulfills many of the requirements stated above and also represents a simple and fast method that can successfully be performed by inexperienced users.”

[0206] The work and writings of Bekei (2013), Seo et al. (2017) and Dey et al. (2017) are consonant and show that those skilled in the art understand that the low reprogramming efficiency reported by Kim et al. (2009) and Zhou et al. (2009) was a function of their employing the cell penetrating peptide (CPP)-protein delivery method, and that the resulting low efficiency of cell reprogramming in their studies is not necessarily generalizable to electroporation-mediated protein delivery and other protein delivery methods which are not constrained by the technical limitations of CPP, as elucidated by Seo (2017), Dey (2017) and Bekei (2013).

[0207] In contrast to the experience of Kim et al., (2009) and Zhou et al., (2009), the current invention teaches that specific proteins may be delivered to the interior of cells in amounts such that the protein(s) persist in the cells long enough to cause them to become developmentally activated, reprogrammed, induced to pluripotency, directly reprogrammed, etc. This is likely achieved, in part, through saturation of protein-degradative pathways by excess transfected factors—extending protein half-lives and the time the introduced proteins persist and have access to their binding sites and interaction partners inside the treated cells.

[0208] The present invention teaches that half-life of RNA may likewise be extended by means of electroporation, wherein larger amounts of RNA are introduced into a cell saturating its RNA degradation pathways, allowing RNA species to persist longer within the cell.

[0209] The present invention further teaches that transfectant half lives may, likewise, be extended by other transfectant delivery methods taught herein wherein such methods are utilized to introduce saturating amounts of the transfectant into a cell.

[0210] The current invention covers electroporation, and other methods known to the art, capable of delivering the desired transfectants to the interiors of cells in amounts 1. sufficient to promote persistence of the proteins in the cells, thereby producing the desired effect, and 2. insufficient to kill the cells. Numerous such methods are known to the art and are easily adapted by (e.g. by increasing protein or nucleic acid transfectant concentration); many such methods are taught herein; they include, for example, liposomal transfection methods, fusogenic or non-fusogenic liposomes, lipofectamine, cationic lipids (e.g. Thermo Scientific Pierce Protein Transfection Reagent (formerly Pro-Ject), and use of nanocapsules or nanovaults.

[0211] Previously, others have induced 293T cells to pluripotency by 1. permeabilizing the cells with streptolysin O (SLO), then 2. applying a protein extract derived from ESC or undifferentiated, human NCCIT teratocarcinoma cells (for 1 hour). Finally, 3. the pores produced by SLO are sealed by incubation (for 2 hours) in 2 mM CaCl2 (Taranget et al., 2005). Critically, however, ˜100,000 pluripotent ESCs or NCCIT cells was required to produce just 1 uL of protein extract.

[0212] The present invention represents an improvement over the methods of Taranger et al., in that it 1. employs much more rapid, less labor-intensive processes and 2. does not require the availability and destruction of already pluripotent cells to induce this characteristic in others. Moreover, in embodiments involving cell permeabilization and/or cell penetration, the present invention teaches methods that are, in some instances, near instantaneous (e.g. electroporation). Likewise, none of the methods taught by the present invention require 2 hours of pore re-sealing. Indeed, when permeabilization is desirable, the permeabilization methods taught herein are faster, less tedious, and may be employed with recombinant and/or defined proteins, nucleic acids, small molecules, and/or physical means.

[0213] Accordingly, in some embodiments, the proteins introduced or overexpressed in selected cells consist of recombinant proteins or nucleic acids, rather than natural protein extracts.

[0214] Likewise, in some embodiments wherein a permeabilizer akin to SLO is used to permeabilize cells for introduction of protein, the proteins introduced following permeabilization consist of recombinant proteins.

[0215] In some embodiments wherein a permeabilizer akin to SLO is used to permeabilize cells for introduction of protein, the proteins are not derived from cell extracts.

[0216] In some embodiments wherein proteins are introduced into cells to produce developmental activation/cell reprogramming or to induce pluripotency, the proteins introduced will not comprise more than two of Oct4, Sox2, and Nanog.

[0217] In some embodiments of the present invention, when proteins are introduced into cells, the proteins do not comprise a complete cellular protein extract.

[0218] In some embodiments, when proteins are introduced into cells, the proteins do not comprise a complete cellular extract derived from a cancer cell or embryonic stem cell.

[0219] In some preferred embodiments, when large throughput is desired, the method of electroporation is large volume flow electroporation (Li et al., 2002; Craiu et al., 2008; Parham et al., 1998; Wang et al., 2009; Wang et al., 2010; Li et al., 2013; Wei et al., 2011); Kamigaki et al., 2013; and Steger et al., 2015).

[0220] The invention further covers the use of cell penetrating peptides in conjunction with electroporation or another delivery method that increases the efficiency with which the peptides enter the cell.

[0221] The present invention covers the combination of various delivery methods, such as electroporation in conjunction with liposomal protein, nucleic acid or other molecule delivery; electroporation in combination with cell penetrating peptides or other recombinant proteins; electroporation in combination with viral transduction; electroporation in combination with nanoparticle, nanotube, nanocapsule or nanovault delivery; electroporation in combination with cationic lipids; electroporation in combination with non-integrating viral vectors (e.g. integrase deficient, episomal, lentiviral vectors); cationic lipids in combination with nanoparticle, nanotube, nanocapsule or nanovault delivery; cationic lipids in combination with cell penetrating peptides, etc.

[0222] The invention further covers the use of other methods and reagents such as those described in U.S. Pat. No. 6,841,535 for the delivery of the protein(s) and other molecules taught herein.

[0223] We have successfully induced millions of cells, at high efficiencies, to change morphology, form colonies, form embryoid, express markers of pluripotency, and display reactomes consistent with developmental activation using a single application of electroporation (see Koken et al., 1994) and other methods described herein.

[0224] However, the invention in no ways precludes repeated application of proteins, nucleic acids, small RNAs or other cell fate determinants taught herein, using electroporation or sonoporation, or other methods described herein for introduction of nucleic acids or proteins.

[0225] In some preferred embodiments, in order to produce developmentally-activated cells (DAdC), nucleic acids or proteins corresponding to transcription factors, small RNAs and/or other cell fate determinants, are electroporated into selected cells using voltages ranging from 100V to 500V (preferentially ˜300V) and pulses ranging from 10 to 300 pulses (preferentially 50-100 pulses), and preferably a pulse length of 5 ms with 100 ms pulse intervals. See also Koken, et al., 1994; Deora et al., 2007; Shi et al., 2018).

[0226] In one preferred embodiment, in order to produce developmentally-activated cells (DAdC), protein transcription factors and small RNAs and/or other cell fate determinants are electroporated into selected cells using pulse length of ˜5 ms and pulse intervals of ˜100 ms.

[0227] However, any electroporation protocol known to the art and suitable for efficiently introducing into selected cells, nucleic acids or proteins corresponding to transcription factors, small RNAs and/or other cell fate determinants, is practicable in the invention.

[0228] In one embodiment, developmentally activated cells are produced by electroporation with one or more transfectant selected from DNA, RNA, protein, small molecule, chemical, compound, extract, and/or oil.

[0229] In one embodiment, developmentally activated cells are produced by electroporation of one or more transfectant selected from DNA, RNA and/or protein corresponding to one or more transcriptions factors and/or cell fate determinants.

[0230] In one embodiment, developmentally activated cells are produced by electroporation of one or more DNA transfectant, whether plasmid DNA, vector DNA, an aptamer, a synthetic oligonucleotide, or other source of DNA encoding or inducing or promoting expression of a transcription factor and/or other cell fate determinant.

[0231] In one embodiment, developmentally activated cells are produced by electroporation of one or more RNA transfectant, whether naked RNA, an RNA virus, small RNA, miRNA, a synthetic oligonucleotide, an aptamer or other source of RNA translatable to or inducing or allowing expression of a transcription factor and/or other cell fate determinant.

[0232] In one embodiment, developmentally activated cells are produced by electroporation with one or more protein transfectant, whether a peptide, full length protein, partial protein, natural protein, native protein, synthetic protein, recombinant protein, or other source of protein acting as a transcription factor or other cell fate determinant; or inducing or allowing the expression of a transcription factor and/or other cell fate determinant.

[0233] In one embodiment, developmentally activated cells are produced by electroporation, albeit at lower efficiencies, in the absence of a DNA, RNA or protein transfectant.

[0234] In one embodiment, the one or more transfect ants is derived from a subject's or a patient's own cells, tissues, fluids or body.

[0235] In one embodiment, developmentally activated cells (DAdC) are produced using sonoporation (see Delalande et al. 2015; Wang et al., 2018), gene gun (see Sanford, 1993; O'Brie, 2001; O'Brien and Lummis, 2007), or laser based transfection (see Yao et al., 2008; Kim and Eberwine, 2010; Pylaev et al., 2018), or by these and other transfection methods (see Kim and Eberwine, 2010; Parent 20192019) or their combination.

[0236] In one embodiment, developmentally activated cells (DAdC) are produced by forcing the cells through filters of progressively reduced size ultimately forcing the cells through the smallest, ˜5 um filter.

[0237] In one embodiment, developmentally activated cells (DAdC) are produced by incubating the cells in plant extracts diluted 1:1000 to 1:5000 (See US20140271923; WO2017161387A1; US2019224193A1; U.S. 62/918,459; and U.S. 62/918,462).

[0238] In one embodiment, developmentally activated cells (DAdC) are produced by forcing the cells through filters of progressively reduced size eventually forcing the cells through 5 um filter.

[0239] In one embodiment, developmentally activated cells (DAdC) are produced by incubating the cells in plant extracts diluted 1:1000 to 1:5000 (See US20140271923; WO2017161387A1; US2019224193A1; U.S. 62/918,459; and U.S. 62/918,462).

[0240] In one embodiment, developmentally activated cells are produced by electroporation, albeit at lower efficiencies, in the absence of any transfectant other than the salts and other components of the buffer (e.g. of phosphate buffered saline).

[0241] It is the proposition of this invention that electroporation allows safer and/or faster production of developmentally activated cells, is compatible with DNA, RNA and Protein transfectants, and allows the avoidance, when desired, of integrating viruses, and/or reliance on oncogenes.

[0242] It is the proposition of this invention that electroporation allows safer and/or faster production of developmentally activated cells, is compatible with DNA, RNA and protein transfect ants, and that multiple rounds of electroporation are not required to achieve the desired effect, although the invention anticipates and contemplates that some practitioners of the invention may, for example, decide to apply reprogramming factors or agents via multiple rounds of electroporation.

[0243] It is the proposition of this invention that electroporation allows safer, more efficient and/or rapid production of developmentally-activated cells using protein and/or other transfectants without repeated application of reprogramming factors and without a requirement for special cell culture conditions; however the invention anticipates, contemplates and covers the use of special cell culture conditions that may further facilitate or enable the developmentally activated cells to acquire the desired cell phenotypes.

[0244] As taught herein, reprogrammed cells represent an example of developmentally-activated cells. Likewise induced pluripotent, induced multipotent, induced self-renewing and/or induced somatic cell types (aka differentiating cells), as described herein, further represent examples of developmentally-activated cells.

[0245] It is taught herein that any protein or RNA or DNA known to those skilled in the art as capable of successfully reprogramming a cell, either directly or indirectly reprogramming said cell, may be applied by electroporation (in vivo or in vitro) to achieve reprogramming with greater speed, greater efficiency and greater safety (Srivastava and DeWitt, 2016; Seo et al., 2017; Fan et al., 2018; Kogut et al., 2018; McGrath et al., 2018; and Aydin and Mazzoni; 2019).

[0246] In one embodiment, greater safety is realized when electroporation is utilized to produce the desired cell types, thereby enabling integrating viral vectors and/or oncogenes to be avoided.

[0247] In one embodiment, greater efficiency is realized when electroporation is utilized, as electroporation enables varying amounts of the transfectant to be delivered to the interior of the selected target cells in a controlled and linear fashion.

[0248] In one embodiment, greater speed is realized when electroporation is utilized, as electroporation enables rapid changes in cell morphology and size to be observed within 24 hours of treatment. As discussed in the parent application, there are many protocols known to those skilled in the art for successful electroporation of a wide variety of transfectants including DNA, RNA, and protein. Koken et al., 1994 demonstrated successful protein electoporation almost thirty years ago. Like Koken et al., we applied electroporation at 300V to enable protein electroporation of selected cells, nevertheless, various voltages, pulse lengths and pulse intervals are suitable for practicing the invention. See, for example, the large number of protocols for electroporation of various transfectants into various cell types archived at www.btxonline.com (https://www.btxonline.com/technical-resources/protocol-database.html; https://www.btxonline.com/media/wysiwyg/protocol_db/Electroporation_Optimization_Guide.pdf; and https://www.btxonline.com/media/wysiwyg/protocol_db/General_Protocol.pdf).

[0249] Delivery of the transfectant increases predictably with pulse number.

[0250] All settings that we tried were successful in delivering protein to the interior of the cells selected. FITC-conjugated albumin served as a test transfectant and offered an excellent means of immediately visualizing the extent of protein delivery to the interior of the cells in conjunction with various electroporation parameters.

[0251] After electroporation, cells were collected, washed and resuspended in PBS or medium for visualization using fluorescent microscopy. With increasing pulse number ranging from 10 pulses to more than 100 pulses, the brightness of the cells increased as well. However, we noted no obvious loss of cell viability, even with >100 pulses.

[0252] Efficient Activation/Induction/Reprogramming was observed using 30-70 pulses: thus 70 pulses was used in the majority of experiments. However, a widely varying number of pulses could be used to achieve the claimed effect.

[0253] Note that the invention may be practiced with any electroporation parameters known to the art so long as they provide for sufficient delivery of the transfect ants to achieve the claimed effect at a desirable efficiency.

[0254] In one preferred embodiment, the voltage is 300V, the pulse length is 5 ms, the pulse interval is 100 ms, and the number of pulses is 70.

[0255] We noted that protein electroporation and other methods of transfection are compatible in activating/inducing/reprogramming a cell. Accordingly, the invention covers the use of electroporation (with or without a transfectant) in combination with other methods taught herein as well as with methods taught by others skilled in the art for activating, inducing or reprogramming a cell to a desirable phenotype.

[0256] The invention may be practiced in vivo using a variety of existing methods and equipment known to the art, However, the present invention also teaches a novel device for in vivo electroporation comprising a catheter and electrode(s).

[0257] In one embodiment, the catheter and electrode(s) are combined, with or without a camera and/or light a light source, as an assembly that can be optionally mounted on a wire or flexible tube such as are used for cardiac catheterization and for endoscopy.

[0258] In some embodiments, the electrodes are sharp and capable of piercing tissue.

[0259] In some embodiments, the electrodes are dull.

[0260] In some embodiments, said assembly may also comprise a needle enabling injection of a transfectant into a tissue and a reservoir (e.g. syringe) where the transfectant is stored immediately prior to injection.

[0261] In some embodiments, said assembly may comprise electrodes taking a form akin to “tweezertrodes”.

[0262] In a preferred embodiment, cells are “selected” from accessible, dividing or non-dividing cell populations for the purpose of generating the desired a) proliferating, multipotent or pluripotent cell population, or b) differentiating populations of somatic cells; moreover the desired cell population may be capable of further differentiation in vitro, further differentiation in vivo, and/or tissue-appropriate and regionally-appropriate differentiation in vivo.

### Sources of Cells Selected for Use in the Invention

[0263] Selected cells may include any cell practicable in the present invention. Cells selected for use in the present invention (herein termed “selected cells”) may originate as endogenous cells of a subject or of a patient—including cells derived from other organ systems; or from exogenous sources (including those derived from cell lines, cryopreserved sources, banked sources, and donors). Cells may also be selected from cells genetically-modified with synthetic or natural nucleic acid sequences (or their corresponding proteins). The term “selected cells”, as used herein, does not include human embryonic stem cells.

[0264] In embodiments of the present invention, in order that they may be isolated without the involvement of invasive procedures, selected cells will preferably be easily accessible cells (e.g. peripheral blood leukocytes, circulating hematopoietic stem cells, epithelial cells (e.g. buccal cheek cells (e.g. Michalczyk et al., 2004), excreted cells, adipose tissue cells (e.g. Gimble et al., 2007; Ma et al., 2007), umbilical cord blood cells (e.g. Zhao, et al., 2006; Tian et al., 2007), etc.). However, bone marrow derived cells, stem cells isolated from amniotic membranes (e.g. Ilancheran et al., 2007), or amniotic fluid (e.g. De Coppi et al., 2007), as well as cells isolated from the skin (e.g. Tumbar, 2006; Dunnwald et al., 2001; Szudal'tseva et al., 2007), etc., are also covered by the present invention. Such cells can be isolated from the tissues in which they reside by any means known to the art.

[0265] The selected cells may be genetically-modified cells, especially cells that have been genetically modified by any means known to the art, to encode therapeutic or commercially useful deoxyribonucleic acid (DNA) or ribonucleic acid (RNA) sequences.

[0266] The selected cells may be genetically-modified cells, especially cells that have been genetically modified by any means known to the art, to encode therapeutic or commercially useful deoxyribonucleic acid (DNA) or ribonucleic acid (RNA) sequences, including through the use of CRISPR/CAS9 or other methods included in the category of site-specific genetic modification.

[0267] In accordance with an aspect of the present invention, there is provided a method of producing a desired, developmentally activated cell population (e.g. pluripotent, pluripotent-like, neuronal, muscle, etc.) from the selected cells.

[0268] Achieving multipotent, pluripotent, self-renewing, “VSEL-like” and/or “pluripotent-like”, developmentally activated cell populations:

[0269] In a preferred embodiment, a population of proliferating, self-renewing, pluripotent or pluripotent-like cells is derived from the selected cell(s) and/or their progeny when said selected cells are transfected with nucleotide sequence(s) or proteins including those encoding the “long” PRR insert+) isoform(s) of the mammalian numb gene (or other cell fate determinants taught herein for producing proliferating, self-renewing, pluripotent or pluripotent-like cells, see below). At about the same time the selected cells may optionally be transfected with synthetic oligonucleotides targeting the short Numb isoforms and Numblike. When performed in vitro, the cells are subsequently cultured under conditions which promote growth of the selected cells at an optimal growth rate. Selected cells are maintained under these conditions for the period of time sufficient to achieve the desired cell number. When transfection is performed in vivo, no further steps are required.

[0270] Transfected cells maintained in vitro may be grown under a variety of growth conditions known to the art, and optionally at the (optimal) rate of growth achieved by incubation with LIF, steel factor, and/or equipotent concentrations of Il-6, hyper IL-6, IL-7, oncostatin-M and/or cardiotrophin-1; or optionally that growth rate achieved in the presence of other growth enhancing cytokines (e.g. those conditions described for culturing pluripotent cells e.g. Guan et al., 2006), and/or chemicals selected from VC6TFZ: VPA, 5-aza-cytidine, CHIR99021 (CHIR), 616452, Tranylcypromine, Forskolin (FSK), 2-methyl-5-hydroxytryptamine (2-Me-5HT), and D4476. The growth rate is determined from the doubling times of the selected cells in said growth culture medium. Likewise, culture conditions such as those described in U.S. Pat. Nos. 6,432,711 and 5,453,357 may also be suitable for the propagation and expansion, at an optimal growth rate, of cells transfected with the long (PRR+) Numb isoform(s). Other appropriate protocols and reference cytokine concentrations have been taught by Koshimizu et al., 1996; Keller et al., 1996; Piquet-Pellorce, 1994; Rose et al., 1994; Park and Han, 2000; Guan et al., 2006; Dykstra et al., 2006; Zhang et al., 2007). However, the practice of the present invention is not limited to the details of these teachings. The cell culture medium need not necessarily contain a cytokine and need not necessarily contain serum and many serum free cell culture media are known to the art.

[0271] In a preferred embodiment, the selected cells are cultured in a standard growth medium (e.g. Minimal Essential Medium with or without it supplements (e.g. glutamine, and beta.-mercaptoethanol). The medium may include basic fibroblast growth factor (bFGF), steel factor, leukemia inhibitory factor (LIF), and/or factors with LIF activity (e.g. LIF, LIF receptor (LIFR), ciliary Neurotrophic factor (CNTF), oncostatin M (OSM), OSM receptor (OSMR), cardiotrophin, interleukins (IL) such as IL-6, hyper IL-6, GP130, etc.) as well as horse serum. LIF, as well as other factors with LIF activity, prevents spontaneous differentiation of the cells. Under these conditions, selected cells transfected with the cell fate determinants taught herein and their progeny are expected to achieve multipotency, pluripotency and/or self-renewal.

[0272] In a preferred embodiment, the selected cell(s) and/or their progeny are transfected with, or overexpress, nucleotide sequence(s) encoding cell fate determinants (or their corresponding proteins), as well as sequences encoding other transgenes (or their corresponding proteins). Many of those transgenes are listed below along with their corresponding identification numbers (accession numbers) in the NCBI sequence database.

[0273] In another preferred embodiment, the selected cell(s) and/or their progeny are transfected with, or overexpress, nucleotide sequence(s) encoding a portion of the “long” (PRR insert+) Numb isoform(s) (or their corresponding proteins), as well as sequences encoding other transgenes (or their corresponding proteins). Many of those transgenes are listed below along with their corresponding identification (accession) numbers (codes) in the NCBI sequence database.

[0274] In a preferred embodiment, the selected cells and/or their progeny are transfected with, or overexpress, long (PRR+) Numb isoform encoding sequences (or their corresponding proteins), as well as sequences encoding other transgenes (or their corresponding proteins), including LIF.

[0275] In a preferred embodiment, the selected cells and/or their progeny are transfected with, or overexpress, long (PRR+) Numb isoform encoding sequences (or their corresponding proteins) as well as sequences encoding other transgenes (or their corresponding proteins), including ones with LIF activity.

[0276] In a preferred embodiment, the selected cells and/or their progeny are transfected with, or overexpress, long (PRR+) Numb isoform(s) encoding sequences (or their corresponding proteins), as well as sequences encoding other transgenes (or their corresponding proteins), including the LIFR.

[0277] In a preferred embodiment, the selected cells and/or their progeny are transfected with, or overexpress, long (PRR+) Numb isoform(s) encoding sequences (or their corresponding proteins) as well as sequences encoding other transgenes (or their corresponding proteins), including oncostatin M (OSM).

[0278] In a preferred embodiment, the selected cells and/or their progeny are transfected with, or overexpress, long (PRR+) Numb isoform(s) encoding sequences (or their corresponding proteins) as well as sequences encoding other transgenes (or their corresponding proteins), including oncostatin M receptor (OSMR).

[0279] In a preferred embodiment, the selected cells and/or their progeny are transfected with, or overexpress, long (PRR+) Numb isoform(s) encoding sequences (or their corresponding proteins) as well as sequences encoding other transgenes (or their corresponding proteins), including cardiotrophin-1.

[0280] In a preferred embodiment, the selected cells and/or their progeny are transfected with, or overexpress, long (PRR+) Numb isoform(s) encoding sequences (or their corresponding proteins) as well as sequences encoding other transgenes (or their corresponding proteins), including CNTF.

[0281] In a preferred embodiment, the selected cells and/or their progeny are transfected with, or overexpress, long (PRR+) Numb isoform(s) encoding sequences (or their corresponding proteins) as well as sequences encoding other transgenes (or their corresponding proteins), including one or more selected from Oct3/4 and/or SOX2.

[0282] In a preferred embodiment, the selected cells and/or their progeny are transfected with, or overexpress, long (PRR+) Numb isoform(s) encoding sequences (or their corresponding proteins) as well as sequences encoding other transgenes (or their corresponding proteins), including NANOG, OCT3/4 and/or SOX2.

[0283] In a preferred embodiment, the selected cells and/or their progeny are transfected with, or overexpress, long (PRR+) Numb isoform(s) encoding sequences (or their corresponding proteins) as well as sequences encoding other transgenes (or their corresponding proteins), including one or more selected from Oct3/4 and SOX2 and/or a transgene with LIF activity.

[0284] In a preferred embodiment, the selected cells and/or their progeny are transfected with, or overexpress, sequences encoding other transgenes (or their corresponding proteins), including one or more selected from Oct3/4 and/or SOX2 and a transgene with LIF activity.

[0285] In a preferred embodiment, the selected cells and/or their progeny are transfected with, or overexpress, long (PRR+) Numb isoform(s) encoding sequences (or their corresponding proteins) as well as sequences encoding other transgenes (or their corresponding proteins), including Notch (e.g. Gaiano et al., 2000).

[0286] In a preferred embodiment, the selected cells and/or their progeny are transfected with, or overexpress, long (PRR+) Numb isoform(s) encoding sequences (or their corresponding proteins) as well as sequences encoding other transgenes (or their corresponding proteins), including one or more selected from Oct3/4, SOX2 and/or Notch (e.g. notch 1 and/or notch 2).

[0287] In a preferred embodiment, the selected cells and/or their progeny are transfected with, or overexpress, long (PRR+) Numb isoform(s) encoding sequences (or their corresponding proteins) as well as sequences encoding other transgenes (or their corresponding proteins), including one or more selected from OCT3/4, SOX2, NANOG, and/or Notch.

[0288] In a preferred embodiment, the selected cells and/or their progeny are transfected with, or overexpress, long (PRR+) Numb isoform(s) encoding sequences (or their corresponding proteins) as well as sequences encoding other transgenes (or their corresponding proteins), including one or more selected from OCT3/4, SOX2, NANOG, and/or a transgene with LIF activity.

[0289] In a preferred embodiment, the selected cells and/or their progeny are transfected with, or overexpress, long (PRR+) Numb isoform(s) encoding sequences (or their corresponding proteins) as well as sequences encoding other transgenes (or their corresponding proteins), including one or more selected from OCT3/4, SOX2, NANOG, and/or multiple transgenes (or their corresponding proteins) with LIF activity.

[0290] In a preferred embodiment, the selected cells and/or their progeny are transfected with, or overexpress, long (PRR+) Numb isoform(s) encoding sequences (or their corresponding proteins) as well as sequences encoding other transgenes (or their corresponding proteins), including one or more selected from OCT3/4, Notch, HOXB4 and/or SOX2.

[0291] Over time, other gene combinations differing from those described herein may be described or discovered capable of causing cells to become multipotent, pluripotent, capable of self-renewal, or to begin differentiating. However, this patent application covers such “genetic reprogramming” of any nucleated cell utilizing nucleic acid or protein electroporation (see Gagne et al., 1991; Saito et al., 2001; Yuan, 2008; Huang et al., 2007; Xia and Zhang, 2007; Cemazar and Sersa 2007; Isaka and Imai, 2007; Luxembourg et al., 2007; Van Tendeloos, 2007; Takahashi, 2007; etc.), liposomes, nanocapsules, nanovaults, etc. (see Goldberg et al., 2007; Li et al., 2007), and/or another approach avoiding viral integration or other random alteration of the cell's genome, as such means increase safety and efficiency.

[0292] Excluded, of course, from the category of “random alteration” are approaches involving gene-targeting and site-directed methods (e.g. CRISPR/CAS9) designed to introduce or remove DNA at specific locations in the genome; and the use of CRISPR/CAS9 to practice the invention is covered by the present invention.

[0293] Likewise, this patent application covers the genetic reprogramming of any nucleated cell utilizing nucleic acid or protein electroporation, liposomes, nanocapsules, nanovaults, etc., and/or another approach avoiding retroviral/lentiviral integration or other random alteration of the cell's genome, as such means increase safety and efficiency. Such approaches and methods include all known to the art and practicable in the present invention.

[0294] In a preferred embodiment, in order to produce developmental activation, nucleic acid(s) or protein(s) corresponding to a single gene, or portion thereof, (particularly those named herein, discovered according to methods described herein, discovered according to other published methods; or known to be multipotency, pluripotency, or self-renewal inducing) are the only nucleic acid(s) or protein(s) overexpressed and/or introduced to produce dividing, self-renewing, mutiltipotent, pluripotent, “VSEL-like” and/or “pluripotent-like” cells from the selected cells. In a preferred embodiment, in order to produce developmental activation, nucleic acid(s) or protein(s) corresponding to a single gene, or portion thereof, (particularly those named herein, discovered according to methods described herein, discovered according to other published methods; or known to be multipotency, pluripotency, or self-renewal inducing) are the only nucleic acid(s) or protein(s) overexpressed and/or introduced to produce dividing, self-renewing, multipotent, pluripotent, “VSEL-like” and/or “pluripotent-like” cells from the selected cells and the method utilized is electroporation, liposomes, nanocapsules, nanovaults, and/or another approach avoiding retroviral/lentiviral integration or other random alteration of the cell's genome.

[0295] In a separate preferred embodiment, in order to produce developmental activation, other nucleic acid(s), protein(s) or other transfectants can be utilized in concert with the nucleic acid(s) or protein(s) corresponding to a single gene, or portion thereof, (particularly those named herein, discovered according to methods described herein, discovered according to other published methods; or known to be multipotency, pluripotency, or self-renewal inducing) so long as a population of dividing, self-renewing, multipotent, pluripotent, “VSEL-like” and/or “pluripotent-like” cells is produced from the selected cells.

[0296] In a separate preferred embodiment, in order to produce developmental activation, other nucleic acid(s), protein(s) or other transfectants can be utilized in concert with the nucleic acid(s) or protein(s) corresponding to a single gene, or portion thereof, (particularly those named herein, discovered according to methods described herein, discovered according to other published methods; or known to be multipotency, pluripotency, or self-renewal inducing) so long as a population of dividing, self-renewing, multipotent, pluripotent, “VSEL-like” and/or “pluripotent-like” cells is produced from the selected cells and the method utilized is electroporation, liposomes, nanocapsules, nanovaults, and/or another approach avoiding retroviral/lentiviral integration or other random alteration of the cell's genome.

[0297] In a preferred embodiment, in order to produce developmental activation, nucleic acid(s) or protein(s) corresponding to Nanog are the only nucleic acid(s) or protein(s) overexpressed and/or introduced to produce dividing, self-renewing, multipotent, pluripotent, “VSEL-like” and/or “pluripotent-like” cells from the selected cells and the method utilized is electroporation, liposomes, nanocapsules, nanovaults, and/or another approach avoiding retroviral/lentiviral integration or other random alteration of the cell's genome.

[0298] In a separate preferred embodiment, in order to produce developmental activation, other nucleic acid(s), protein(s) or other transfectants can be utilized in concert with the nucleic acid(s) or protein(s) corresponding to Nanog so long as a population of dividing, self-renewing, multipotent, pluripotent, “VSEL-like” and/or “pluripotent-like” cells is produced from the selected cells and the method utilized is electroporation, liposomes, nanocapsules, nanovaults, and/or another approach avoiding viral integration or other random alteration of the cell's genome.

[0299] In a separate preferred embodiment, nucleic acid(s) or protein(s) corresponding to Oct4 and Sox2 are the only nucleic acid(s) or protein(s) overexpressed and/or introduced to produce dividing, self-renewing, multipotent, pluripotent, “VSEL-like” and/or “pluripotent-like” cells from the selected cells and the method utilized is electroporation, liposomes, nanocapsules, nanovaults, and/or another approach avoiding viral integration or other random alteration of the cell's genome. In a separate preferred embodiment, in order to produce developmental activation, other nucleic acid(s) or protein(s) are utilized in concert with the nucleic acid(s) or protein(s) corresponding to Oct4/Sox2 so long as a population of dividing, self-renewing, multipotent, pluripotent, “VSEL-like” and/or “pluripotent-like” cells is produced from the selected cells and the method utilized is electroporation, liposomes, nanocapsules, nanovaults, and/or another approach avoiding viral integration or other random alteration of the cell's genome.

[0300] In a separate preferred embodiment, nucleic acid(s) or protein(s) corresponding to Nxx3-1 are utilized to produce a population of dividing, self-renewing, multipotent, pluripotent, “VSEL-like” and/or “pluripotent-like” cells from the selected cells.

[0301] In a separate preferred embodiment, nucleic acid(s) or protein(s) corresponding to Long (PRR+) Numb isoforms are the only nucleic acid(s) or protein(s) overexpressed and/or introduced to produce dividing, self-renewing, multipotent, pluripotent, “VSEL-like” and/or “pluripotent-like” cells from the selected cells and the method utilized is electroporation, liposomes, nanocapsules, nanovaults, and/or another approach avoiding viral integration or other random alteration of the cell's genome.

[0302] In a separate preferred embodiment, in order to produce developmental activation, other nucleic acid(s) or protein(s) are utilized in concert with the nucleic acid(s) or protein(s) corresponding to Long (PRR+) Numb isoforms so long as a population of dividing, self-renewing, multipotent, pluripotent, “VSEL-like” and/or “pluripotent-like” cells is produced from the selected cells and the method is electroporation, liposomes, nanocapsules, nanovaults, and/or another approach avoiding viral integration or other random alteration of the cell's genome.

[0303] In a preferred embodiment, in order to produce developmental activation, nucleic acid(s) or protein(s) corresponding to Nanog are the only nucleic acid(s) or protein(s) overexpressed and/or introduced to produce dividing, self-renewing, multipotent, pluripotent, “VSEL-like” and/or “pluripotent-like” cells from the selected cells.

[0304] In a preferred embodiment, in order to produce developmental activation, nucleic acid(s) or protein(s) corresponding to Nanog are the only nucleic acid(s) or protein(s) overexpressed and/or introduced to produce dividing, self-renewing, multipotent, pluripotent, “VSEL-like” and/or “pluripotent-like” cells from the selected cells and the method utilized is electroporation, liposomes, nanocapsules, nanovaults, and/or another approach avoiding retroviral/lentiviral integration or other random alteration of the cell's genome.

[0305] In a separate preferred embodiment, in order to produce developmental activation, other nucleic acid(s), protein(s) or other transfectants can be utilized in concert with the nucleic acid(s) or protein(s) corresponding to Nanog so long as a population of dividing, self-renewing, multipotent, pluripotent, “VSEL-like” and/or “pluripotent-like” cells is produced from the selected cells.

[0306] In a separate preferred embodiment, in order to produce developmental activation, other nucleic acid(s), protein(s) or other transfectants can be utilized in concert with the nucleic acid(s) or protein(s) corresponding to Nanog so long as a population of dividing, self-renewing, multipotent, pluripotent, “VSEL-like” and/or “pluripotent-like” cells is produced from the selected cells and the method utilized is electroporation, liposomes, nanocapsules, nanovaults, and/or another approach avoiding retroviral/lentiviral integration or other random alteration of the cell's genome.

[0307] In a preferred embodiment, in order to produce developmental activation, nucleic acid(s) or protein(s) corresponding to a gene with LIF activity are the only nucleic acid(s) or protein(s) overexpressed and/or introduced to produce dividing, self-renewing, multipotent, pluripotent, “VSEL-like” and/or “pluripotent-like” cells from the selected cells.

[0308] In a preferred embodiment, in order to produce developmental activation, nucleic acid(s) or protein(s) corresponding to a gene with LIF activity are the only nucleic acid(s) or protein(s) overexpressed and/or introduced to produce dividing, self-renewing, multipotent, pluripotent, “VSEL-like” and/or “pluripotent-like” cells from the selected cells and the method utilized is electroporation, liposomes, nanocapsules, nanovaults, and/or another approach avoiding retroviral/lentiviral integration or other random alteration of the cell's genome.

[0309] In a separate preferred embodiment, in order to produce developmental activation, other nucleic acid(s), protein(s) or other transfectants can be utilized in concert with the nucleic acid(s) or protein(s) corresponding to a gene with LIF activity so long as a population of dividing, self-renewing, multipotent, pluripotent, “VSEL-like” and/or “pluripotent-like” cells is produced from the selected cells.

[0310] In a separate preferred embodiment, in order to produce developmental activation, other nucleic acid(s), protein(s) or other transfectants can be utilized in concert with the nucleic acid(s) or protein(s) corresponding to a gene with LIF activity so long as a population of dividing, self-renewing, multipotent, pluripotent, “VSEL-like” and/or “pluripotent-like” cells is produced from the selected cells and the method utilized is electroporation, liposomes, nanocapsules, nanovaults, and/or another approach avoiding retroviral/lentiviral integration or other random alteration of the cell's genome.

[0311] In a preferred embodiment, in order to produce developmental activation, nucleic acid(s) or protein(s) corresponding to Oct4 are the only nucleic acid(s) or protein(s) overexpressed and/or introduced to produce dividing, self-renewing, multipotent, pluripotent, “VSEL-like” and/or “pluripotent-like” cells from the selected cells.

[0312] In a preferred embodiment, in order to produce developmental activation, nucleic acid(s) or protein(s) corresponding to Oct4 are the only nucleic acid(s) or protein(s) overexpressed and/or introduced to produce dividing, self-renewing, multipotent, pluripotent, “VSEL-like” and/or “pluripotent-like” cells from the selected cells and the method utilized is electroporation, liposomes, nanocapsules, nanovaults, and/or another approach avoiding retroviral/lentiviral integration or other random alteration of the cell's genome.

[0313] In a separate preferred embodiment, in order to produce developmental activation, other nucleic acid(s), protein(s) or other transfectants can be utilized in concert with the nucleic acid(s) or protein(s) corresponding to Oct4 so long as a population of dividing, self-renewing, multipotent, pluripotent, “VSEL-like” and/or “pluripotent-like” cells is produced from the selected cells. In a separate preferred embodiment, in order to produce developmental activation, other nucleic acid(s), protein(s) or other transfectants can be utilized in concert with the nucleic acid(s) or protein(s) corresponding to Oct4 so long as a population of dividing, self-renewing, multipotent, pluripotent, “VSEL-like” and/or “pluripotent-like” cells is produced from the selected cells and the method utilized is electroporation, liposomes, nanocapsules, nanovaults, and/or another approach avoiding retroviral/lentiviral integration or other random alteration of the cell's genome. In a preferred embodiment, in order to produce developmental activation, nucleic acid(s) or protein(s) corresponding to Sox2 are the only nucleic acid(s) or protein(s) overexpressed and/or introduced to produce dividing, self-renewing, multipotent, pluripotent, “VSEL-like” and/or “pluripotent-like” cells from the selected cells.

[0314] In a preferred embodiment, in order to produce developmental activation, nucleic acid(s) or protein(s) corresponding to Sox2 are the only nucleic acid(s) or protein(s) overexpressed and/or introduced to produce dividing, self-renewing, multipotent, pluripotent, “VSEL-like” and/or “pluripotent-like” cells from the selected cells and the method utilized is electroporation, liposomes, nanocapsules, nanovaults, and/or another approach avoiding retroviral/lentiviral integration or other random alteration of the cell's genome.

[0315] In a separate preferred embodiment, in order to produce developmental activation, other nucleic acid(s), protein(s) or other transfectants can be utilized in concert with the nucleic acid(s) or protein(s) corresponding to Sox2 so long as a population of dividing, self-renewing, multipotent, pluripotent, “VSEL-like” and/or “pluripotent-like” cells is produced from the selected cells.

[0316] In a separate preferred embodiment, in order to produce developmental activation, other nucleic acid(s), protein(s) or other transfectants can be utilized in concert with the nucleic acid(s) or protein(s) corresponding to Sox2 so long as a population of dividing, self-renewing, multipotent, pluripotent, “VSEL-like” and/or “pluripotent-like” cells is produced from the selected cells and the method utilized is electroporation, liposomes, nanocapsules, nanovaults, and/or another approach avoiding retroviral/lentiviral integration or other random alteration of the cell's genome.

[0317] In a preferred embodiment, in order to produce developmental activation, nucleic acid(s) or protein(s) corresponding to lin28 are the only nucleic acid(s) or protein(s) overexpressed and/or introduced to produce dividing, self-renewing, multipotent, pluripotent, “VSEL-like” and/or “pluripotent-like” cells from the selected cells.

[0318] In a preferred embodiment, in order to produce developmental activation, nucleic acid(s) or protein(s) corresponding to lin28 are the only nucleic acid(s) or protein(s) overexpressed and/or introduced to produce dividing, self-renewing, multipotent, pluripotent, “VSEL-like” and/or “pluripotent-like” cells from the selected cells and the method utilized is electroporation, liposomes, nanocapsules, nanovaults, and/or another approach avoiding retroviral/lentiviral integration or other random alteration of the cell's genome.

[0319] In a separate preferred embodiment, in order to produce developmental activation, other nucleic acid(s), protein(s) or other transfectants can be utilized in concert with the nucleic acid(s) or protein(s) corresponding to lin28 so long as a population of dividing, self-renewing, multipotent, pluripotent, “VSEL-like” and/or “pluripotent-like” cells is produced from the selected cells and the method utilized is electroporation, liposomes, nanocapsules, nanovaults, and/or another approach avoiding retroviral/lentiviral integration or other random alteration of the cell's genome.

[0320] In a preferred embodiment, in order to produce developmental activation, nucleic acid(s) or protein(s) corresponding to c-myc are the only nucleic acid(s) or protein(s) overexpressed and/or introduced to produce dividing, self-renewing, multipotent, pluripotent, “VSEL-like” and/or “pluripotent-like” cells from the selected cells.

[0321] In a preferred embodiment, in order to produce developmental activation, nucleic acid(s) or protein(s) corresponding to c-myc are the only nucleic acid(s) or protein(s) overexpressed and/or introduced to produce dividing, self-renewing, multipotent, pluripotent, “VSEL-like” and/or “pluripotent-like” cells from the selected cells and the method utilized is electroporation, liposomes, nanocapsules, nanovaults, and/or another approach avoiding retroviral/lentiviral integration or other random alteration of the cell's genome.

[0322] In a separate preferred embodiment, in order to produce developmental activation, other nucleic acid(s), protein(s) or other transfectants can be utilized in concert with the nucleic acid(s) or protein(s) corresponding to c-myc so long as a population of dividing, self-renewing, multipotent, pluripotent, “VSEL-like” and/or “pluripotent-like” cells is produced from the selected cells.

[0323] In a separate preferred embodiment, in order to produce developmental activation, other nucleic acid(s), protein(s) or other transfectants can be utilized in concert with the nucleic acid(s) or protein(s) corresponding to c-myc so long as a population of dividing, self-renewing, multipotent, pluripotent, “VSEL-like” and/or “pluripotent-like” cells is produced from the selected cells and the method utilized is electroporation, liposomes, nanocapsules, nanovaults, and/or another approach avoiding retroviral/lentiviral integration or other random alteration of the cell's genome.

[0324] In a separate preferred embodiment, nucleic acid(s) or protein(s) corresponding Oct4 and/or Sox2 are the only nucleic acid(s) or protein(s) overexpressed and/or introduced to produce dividing, self-renewing, multipotent, pluripotent, “VSEL-like” and/or “pluripotent-like” cells from the selected cells.

[0325] In a separate preferred embodiment, nucleic acid(s) or protein(s) corresponding to Oct4 and/or Sox2 are the only nucleic acid(s) or protein(s) overexpressed and/or introduced to produce dividing, self-renewing, multipotent, pluripotent, “VSEL-like” and/or “pluripotent-like” cells from the selected cells and the method utilized is electroporation, liposomes, nanocapsules, nanovaults, and/or another approach avoiding retroviral/lentiviral integration or other random alteration of the cell's genome.

[0326] In a separate preferred embodiment, in order to produce developmental activation, other nucleic acid(s) or protein(s) are utilized in concert with the nucleic acid(s) or protein(s) corresponding to Oct4 and/or Sox2 so long as a population of dividing, self-renewing, multipotent, pluripotent, “VSEL-like” and/or “pluripotent-like” cells is produced from the selected cells.

[0327] In a separate preferred embodiment, in order to produce developmental activation, other nucleic acid(s) or protein(s) are utilized in concert with the nucleic acid(s) or protein(s) corresponding to Oct4 and/or Sox2 so long as a population of dividing, self-renewing, multipotent, pluripotent, “VSEL-like” and/or “pluripotent-like” cells is produced from the selected cells and the method utilized is electroporation, liposomes, nanocapsules, nanovaults, and/or another approach avoiding retroviral/lentiviral integration or other random alteration of the cell's genome. In a separate preferred embodiment, nucleic acid(s) or protein(s) corresponding to Long (PRR+) Numb isoforms are the only nucleic acid(s) or protein(s) overexpressed and/or introduced to produce dividing, self-renewing, multipotent, pluripotent, “VSEL-like” and/or “pluripotent-like” cells from the selected cells.

[0328] In a separate preferred embodiment, nucleic acid(s) or protein(s) corresponding to Long (PRR+) Numb isoforms are the only nucleic acid(s) or protein(s) overexpressed and/or introduced to produce dividing, self-renewing, multipotent, pluripotent, “VSEL-like” and/or “pluripotent-like” cells from the selected cells and the method utilized is electroporation, liposomes, nanocapsules, nanovaults, and/or another approach avoiding retroviral/lentiviral integration or other random alteration of the cell's genome.

[0329] In a separate preferred embodiment, in order to produce developmental activation, other nucleic acid(s) or protein(s) are utilized in concert with the nucleic acid(s) or protein(s) corresponding to Long (PRR+) Numb Isoforms so long as a population of dividing, self-renewing, multipotent, pluripotent, “VSEL-like” and/or “pluripotent-like” cells is produced from the selected cells.

[0330] In a separate preferred embodiment, in order to produce developmental activation, other nucleic acid(s) or protein(s) are utilized in concert with the nucleic acid(s) or protein(s) corresponding to Long (PRR+) Numb Isoforms so long as a population of dividing, self-renewing, multipotent, pluripotent, “VSEL-like” and/or “pluripotent-like” cells is produced from the selected cells and the method utilized is electroporation, liposomes, nanocapsules, nanovaults, and/or another approach avoiding retroviral/lentiviral integration or other random alteration of the cell's genome.

[0331] In a separate preferred embodiment, nucleic acid(s) or protein(s) corresponding to Oct4, Sox2, and/or Nanog are the only nucleic acid(s) or protein(s) overexpressed and/or introduced to produce dividing, self-renewing, multipotent, pluripotent, “VSEL-like” and/or “pluripotent-like” cells from the selected cells.

[0332] In a separate preferred embodiment, nucleic acid(s) or protein(s) corresponding to Oct4, Sox2, and/or Nanog are the only nucleic acid(s) or protein(s) overexpressed and/or introduced to produce dividing, self-renewing, multipotent, pluripotent, “VSEL-like” and/or “pluripotent-like” cells from the selected cells and the method utilized is electroporation, liposomes, nanocapsules, nanovaults, and/or another approach avoiding retroviral/lentiviral integration or other random alteration of the cell's genome.

[0333] In a separate preferred embodiment, in order to produce developmental activation, other nucleic acid(s) or protein(s) are utilized in concert with the nucleic acid(s) or protein(s) corresponding to Oct4, Sox2, and/or Nanog so long as a population of dividing, self-renewing, multipotent, pluripotent, “VSEL-like” and/or “pluripotent-like” cells is produced from the selected cells.

[0334] In a separate preferred embodiment, in order to produce developmental activation, other nucleic acid(s) or protein(s) are utilized in concert with the nucleic acid(s) or protein(s) corresponding to Oct4, Sox2, and/or Nanog so long as a population of dividing, self-renewing, multipotent, pluripotent, “VSEL-like” and/or “pluripotent-like” cells is produced from the selected cells and the method utilized is electroporation, liposomes, nanocapsules, nanovaults, and/or another approach avoiding retroviral/lentiviral integration or other random alteration of the cell's genome.

[0335] In a separate preferred embodiment, nucleic acid(s) or protein(s) corresponding to Long (PRR+) Numb isoforms are the only nucleic acid(s) or protein(s) overexpressed and/or introduced to produce dividing, self-renewing, multipotent, pluripotent, “VSEL-like” and/or “pluripotent-like” cells from the selected cells.

[0336] In a separate preferred embodiment, nucleic acid(s) or protein(s) corresponding to Long (PRR+) Numb isoforms are the only nucleic acid(s) or protein(s) overexpressed and/or introduced to produce dividing, self-renewing, multipotent, pluripotent, “VSEL-like” and/or “pluripotent-like” cells from the selected cells and the method is electroporation, liposomes, nanocapsules, nanovaults, and/or another approach avoiding retroviral/lentiviral integration or other random alteration of the cell's genome.

[0337] In a separate preferred embodiment, in order to produce developmental activation, other nucleic acid(s) or protein(s) are utilized in concert with the nucleic acid(s) or protein(s) corresponding to Long (PRR+) Numb isoforms so long as a population of dividing, self-renewing, multipotent, pluripotent, “VSEL-like” and/or “pluripotent-like” cells is produced from the selected cells.

[0338] In a separate preferred embodiment, in order to produce developmental activation, other nucleic acid(s) or protein(s) are utilized in concert with the nucleic acid(s) or protein(s) corresponding to Long (PRR+) Numb isoforms so long as a population of dividing, self-renewing, multipotent, pluripotent, “VSEL-like” and/or “pluripotent-like” cells is produced from the selected cells and the method is electroporation, liposomes, nanocapsules, nanovaults, and/or another approach avoiding retroviral/lentiviral integration or other random alteration of the cell's genome.

[0339] It is to be understood that any combination of nucleic acid or protein sequences (or their corresponding proteins) described herein can be modified by excluding those corresponding to Numb and/or Numblike so long as the desired cell population or behavior is achieved.

[0340] Similarly, it should be understood that the methods described herein for initiating differentiation are applicable to any induced or non-induced multipotent, pluripotent, or self-renewing stem cells, other progenitor cells, or other somatic cells, not only those obtained in the manner described herein.

[0341] It is to be understood that any combination of nucleic acid or protein sequences (or their corresponding proteins) described herein can be modified by excluding nucleic acid sequences or proteins corresponding to Numb and/or Numblike so long as the desired cell population is achieved.

[0342] In another embodiment, the various nucleic acid or protein combinations described herein are employed with the exclusion of the nucleic acid or protein corresponding to the Numblike and/or Numb isoforms.

[0343] In a preferred embodiment, the selected cells and/or their progeny are cells that have been genetically-modified beforehand.

[0344] In a preferred embodiment, the transfection steps described herein represent transient transfection.

[0345] In a further preferred embodiment such transient transfection is accomplished using viral vectors that do not integrate into the host genome. Non-integrating and episomal viral vectors are well known to the art and include 2nd and 3rd generation, integrase-deficient, non-integrating, lentiviral vectors, including 3rd generation lentivectors taught herein. Such integrase-deficient vectors can be readily introduced using a variety of standard transfection techniques (e.g. electroporation, chemically mediated transfection, fusogenic or non-fusogenic liposomes, lipofectamine, nanocapsules, nanovaults, etc.)—methods which allow high capacity integrase-deficient lentiviral vectors to be utilized without genomic integration and random alteration of the genome (see FIG. 3D).

[0346] Over time, other gene combinations differing from those described herein may be described or discovered capable of causing cells to become multipotent, pluripotent, capable of self-renewal or to begin differentiating. However, this patent application also covers the genetic reprogramming of any nucleated cell utilizing nucleic acid or protein electroporation (for example methods see Gagne et al., 1991; Saito et al., 2001; Yuan, 2008; Huang et al., 2007; Xia and Zhang, 2007; Cemazar and Sersa 2007; Isaka and Imai, 2007; Luxembourg et al., 2007; Van Tendeloos, 2007; Takahashi, 2007; etc.) electroporation, liposomes, nanocapsules, nanovaults, and/or another approach avoiding viral integration or other random alteration of the cell's genome as such means increase safety and efficiency.

[0347] In another preferred embodiment, transfection with (or overexpression of) long (PRR+) numb isoform encoding sequences (or their corresponding proteins) (and/or synthetic oligonucleotides targeting numblike and short numb isoforms) is accompanied or replaced by transient or permanent transfection with (or overexpression of) other sequences (or their corresponding proteins) including one or more selected from those encoding human LIF (e.g. Du and Shi, 1996) oncostatin-M, cardiotrophin-1, IL-11, IL-6, IL6R, hyper IL-6, LIFR, gp130, OCT3 (OCT4), Nanog, SOX2, and/or FGF-4.

[0348] Simultaneous transfection with (or overexpression of) any subset of these distinct transgene sequences (or their corresponding proteins) can be accomplished by any means known to the art including the use of a single genetic vector, multiple genetic vectors, serial transfection and selection based on distinct marker proteins and/or antibiotic resistances.

[0349] In another embodiment, the cells selected for developmental activation are cultured in a cell culture promoting an optimal growth rate, such as described above, and that includes EGF, bFGF, oncostatin, LIF (e.g. Du and Shi, 1996), steel factor, IL-11, cardiotrophin-1, IL-6, hyper-IL-6, CNTF, and/or soluble gp130.

[0350] In another embodiment, when neural progenitor cells are the desired cells, the cells selected for developmental activation are incubated in a growth medium comprising one or more of VPA, BIX01294, RG108, PD0325901, CHIR99021, vitamin C, CHIR99021, RepSox, A83-01, Thiazovivin, Purmophamin, LDN193189, and RG108.

### Assessment of Potency and Differentiation

[0351] Pluripotency and multipotency can be assessed by any means known to the art including 1) transplantation, 2) culture under conditions promoting embryoid body formation, 3) injection of cells into animal blastocyst stage embryos with subsequent development, and 4) RNA expression assays (e.g. RT-PCR and microarray based analyses) for gene expression associated with differentiation, multipotency, pluripotency, etc. (see Guan et al., 2006), 5) colony-formation, as well as by ES-like morphology. One approach disclosed herein for detecting pluripotency in selected cells and/or their progeny involves transfection with (or overexpression of) a reporter construct comprising the Nanog promoter operably linked to a fluorescent protein gene. This allows identification and enrichment of Nanog expressing cells using Fluorescence Activated Cell Sorting (FACS), etc.

[0352] In a preferred embodiment, endogenous cells (e.g. cells surrounding a burn or injury site) are transfected in vivo with genetic vectors encoding the long (PRR+) numb isoform(s) alone or in conjunction with other transgenes (or their corresponding proteins) named herein to transiently promote renewed or increased cell proliferation. This approach can also be utilized clinically in the setting of hypoplastic tissues, disorders where stem/progenitor cells are abnormally depleted, and other disorders where the approach can be shown to be beneficial.

### Achieving Differentiating Cell Populations

[0353] In order to achieve b) neural c) muscle d) and other cell populations capable of further environmentally-regulated differentiation in vivo, selected cell(s) and/or their progeny are optionally transfected with long (PRR+) Numb isoform sequence(s) and/or synthetic oligonucleotide sequences and expanded by growth for sufficient time to achieve the desirable number of cell progeny in vitro (as described above).

[0354] Following this optional step, the selected cells and/or their progeny are washed free of the cytokines and agents comprising the expansion/optimal growth media, and are optionally transfected with the nucleotide sequence(s) encoding the Numblike gene and/or “short” (PRR-) Numb isoform(s) and/or synthetic oligonucleotides targeting the long (PRR+) isoforms, etc. (e.g. Zachres et al., 2005), then cultured under conditions which promote differentiation of the selected cells into the desired cell type(s).

[0355] In most instances, the cells are then cultured in the presence of 5-10% fetal bovine serum and agents(s) promoting differentiation of the selected cells and/or their progeny into a desired cell population. The presence of the fetal bovine and of the agents(s) provides for growth or proliferation at a rate that is less than the optimal (or expansion) growth rate, and favors differentiation of the cells into a desired cell population. The agents and precise culture conditions are selected according to the desired cell population as described below.

### Achieving Neuronal or Neural Cell Populations

[0356] When the desired cell population is a neural cell population, the successfully transfected cells are cultured under conditions that promote growth at a rate which is less than the optimal rate and in the presence of agent(s) promoting differentiation of the cells into neural cells. Conditions promoting differentiation into neurons have been described in numerous publications including (Benninger et al., 2003; Chung et al. 2005; Harkany et al., 2004; Ikeda et al., 2004; Ikeda et al., 2005; Wernig et al., 2002; and Wernig et al., 2004). Furthermore, combining retinoic acid exposure with the presence of additional cytokines favors specific neuronal cell type differentiation in vitro (e.g. Soundararajan et al., 2006; Soundararajan et al., 2007; U.S. Pat. No. 6,432,711).

[0357] In a preferred embodiment, in vitro differentiation of neurons or neural cells occurs in the presence of 50 ng/mL nerve growth factor (NGF).

[0358] In a preferred embodiment, when a neuronal population is the desired cell population, transfection with (or overexpression of) sequences encoding short numb isoforms (and/or numblike) is accompanied or replaced by transient or permanent transfection with (or overexpression of) other sequences (or their corresponding proteins) including one or more selected from miR-124, miR-128, Nurr1, REN, Neurogenin1, Neurogenin2, Neurogenin3, Mash 1, Phox2b, Phox2a, dHand, Gata3, Shh, FGF8, Lmx1a, Lmx1b, Nkx2.2, Pet1, Lbx1, Ptx-3, Pitx2, Dlx1, Dlx2, Dlx5, and/or Rnx.

[0359] In another preferred embodiment, when dopaminergic neurons are the desired neuronal population, transfection with (or overexpression of) sequences (or their corresponding proteins) encoding short numb isoforms (and/or numblike) is accompanied or replaced by transient or permanent transfection with (or overexpression of) other sequences (or their corresponding proteins) including one or more selected from those encoding Mash 1 (Ascl1), Ngn2, Nurr1, Lmx1a, Lmx1b, Foxa2, Brn2, Myt1l, Otx2, and/or Ptx-3.

[0360] In another preferred embodiment, when serotonergic neurons are the desired neuronal population, transfection with (or overexpression of) sequences (or their corresponding proteins) encoding short numb isoforms (and/or numblike) is accompanied or replaced by transient or permanent transfection with (or overexpression of) other sequences (or their corresponding proteins) including one or more selected from those encoding Mash1 (Ascl1), Phox2b, Lmx1b, Nkx2.2, Gata2, Gata3 and/or Pet1.

[0361] In another preferred embodiment, when cholinergic neurons are the desired neuronal population, transfection with (or overexpression of) sequences (or their corresponding proteins) encoding short numb isoforms (and/or numblike) is accompanied or replaced by transient or permanent transfection with (or overexpression of) other sequences (or their corresponding proteins) including one or more selected from those encoding MASH1 (ASCL1), Phox2a and/or REST4.

[0362] In another preferred embodiment, when GABAergic neurons are the desired neuronal population, transfection with (or overexpression of) sequences (or their corresponding proteins) encoding short numb isoforms (and/or numblike) is accompanied or replaced by transient or permanent transfection with (or overexpression of) other sequences (or their corresponding proteins) including one or more selected from those encoding MASH1 (ASCL1), Phox2a and/or REST4, followed, optionally, by culture in media supplemented with LIF, Neurotrophin 3 (NT3), and/or nerve growth factor (NGF).

[0363] In another preferred embodiment, when noradrenergic neurons are the desired neuronal population, transfection with (or overexpression of) sequences (or their corresponding proteins) encoding short numb isoforms (and/or numblike) is accompanied or replaced by transient or permanent transfection with (or overexpression of) other sequences (or their corresponding proteins) including one or more selected from those encoding Mash1 (Ascl1), dHand, Phox2a, Phox2b, Brn2, Myt1, Gata2 and/or Gata3.

[0364] In another preferred embodiment, when GABAergic neurons are the desired neuronal population, transfection with (or overexpression of) sequences (or their corresponding proteins) encoding short numb isoforms (and/or numblike) is accompanied or replaced by transient or permanent transfection with (or overexpression of) other sequences (or their corresponding proteins) including one or more selected from those encoding Mash 1 (Ascl1), PITX2, Dlx2, Dlx5, antisense Hes1 RNA and/or other HES1 targeting synthetic oligonucleotides.

[0365] In another preferred embodiment, when a neuronal or neural cell population is the desired population, cells are cultured in a cell culture medium promoting differentiation, such as described above and that includes one or more of the following agents: retinoic acid, Forskolin, ISX9, CHIR99021, SB431542, I-BET151, Forskolin PD0325901, LDN193189, Pifithrin-α, SP600125, GO6983, Y-27632, NT3, NGF, glial cell-line derived growth factor (GDNF), and interferon gamma (IFN-gamma).

### Achieving Muscle Cell Populations

[0366] When the desired cell population is a muscle population, the successfully transfected cells are cultured in the presence of an agent promoting differentiation of the cells into muscle cells and growth at a rate less than the optimal rate. Conditions promoting differentiation into muscle cells have also been described previously (Nakamura et al., 2003; Pal and Khanna, 2005; Pipes et al., 2005; Albilez et al., 2006; Pal and Khanna, 2007; Behfar et al., 2007; U.S. Pat. No. 6,432,711). Furthermore, exposure of selected cells and/or their progeny to hexamethylene bis-acrylamide or dimethylsulfoxide in the presence of additional cytokines favors the initiation of muscle type differentiation in vitro.

[0367] In a preferred embodiment, when a cardiac muscle cell population is the desired population, cells transfected with short (PRR-) numb isoforms (and/or numblike) are cultured in a cell culture medium promoting differentiation into cardiomycytes (He et al., 2003; Guan et al., 2007; etc.), or that includes specific agents at concentrations promoting cardiac cell differentiation (e.g. 0.75%-1% dimethyl sulfoxide (DMSO), 20% normal bovine serum (NBS), 10(−7) mM retinoic acid (RA) and 20% cardiomyocytes conditioned medium (Hua et al., 2006).

[0368] In another preferred embodiment, when a cardiomyocyte muscle cell population is the desired population, transfection with (or overexpression of) sequences (or their corresponding proteins) encoding short numb isoforms (and/or numblike) is accompanied or replaced by transient or permanent transfection with (or overexpression of) other sequences (or their corresponding proteins) including one or more selected from miR-1-1, miR-1-2, miR-133, miR-208, miR-499 and those encoding Gata 4, Gata 5, Gata 6, myocardin, Esrrg, Mesp1, Zfpm2 Ets2, Mesp, Myocd, Nkx2.5, Hand2, Mef2c, JAK inhibitor I and Tbx5.

[0369] In a preferred embodiment, when a muscle cell population is the desired cell population, transfection with (or overexpression of) sequences (or their corresponding proteins) encoding short numb isoforms (and/or numblike) is accompanied or replaced by transient or permanent transfection with (or overexpression of) other sequences (or their corresponding proteins) including one or more selected from those encoding muscle type specific bHLH-encoding sequences (or their corresponding proteins), MyoD, Myogenin, Myf5, Myf6, Gata 4, Gata 5, Gata 6, Mef2, Tbx5, Hand2, Myocardin, Ifrd1 and/or other muscle transcription factors and small RNAs.

[0370] In a preferred embodiment, when a smooth muscle cell population is the desired cell population, transfection with (or overexpression of) sequences (or their corresponding proteins) encoding short numb isoforms (and/or numblike) is accompanied or replaced by transient or permanent transfection with (or overexpression of) other sequences (or their corresponding proteins) including one or more selected from those encoding the muscle type specific Myocardin nucleotide sequence.

[0371] In a preferred embodiment, when a skeletal muscle cell population is the desired cell population, transfection with (or overexpression of) sequences (or their corresponding proteins) encoding short numb isoforms (and/or numblike) is accompanied or replaced by transient or permanent transfection with (or overexpression of) other sequences (or their corresponding proteins) including one or more selected from those encoding the muscle type specific MyoD and myogenin nucleotide sequences.

[0372] Further, when the desired cell population is a skeletal muscle cell population, the transfected or overexpressed sequences may include one or more selected from miR-1, miR-1-1, miR-1-2, miR-206, miR-26a, miR-133, miR-133a-1 and miR-133a-2.

[0373] In a preferred embodiment, when an oligodendrocyte cell population is the desired cell population, transfection with (or overexpression of) sequences (or their corresponding proteins) encoding short numb isoforms (and/or numblike) is accompanied or replaced by transient or permanent transfection with (or overexpression of) other sequences (or their corresponding proteins) including one or more selected from those encoding the oligodendrocyte-specific OLIG1, OLIG2, Nkx2.2, Nkx6.2, Sox10, ST18, Gm98, Myt1, Zfp536 and Zfp488 nucleotide sequences.

[0374] Simultaneous transfection with (or overexpression of) any subset of these distinct transgene sequences (or their corresponding proteins) listed above can be accomplished by any means known to the art including the use of multiple genetic vectors, serial transfection as well as selection based on distinct marker proteins and/or antibiotic resistance.

[0375] When the desired cell population is a hematopoietic cell population, the differentiation medium may include specific agents at concentrations promoting differentiation into hematopoietic progenitor cells (e.g. vascular endothelial growth factor (VEGF), thrombopoietin, etc. (e.g. Ohmizono, 1997; Wang et al., 2005; Srivastava et al., 2007; Gupta et al., 2007) or differentiated hematopoietic cell types (according to methods known to the art for providing differentiated hematopoietic cell types from undifferentiated or pluripotent cells).

[0376] When the desired cell population is a germ cell population, the differentiation medium may include specific agents at concentrations promoting differentiation into germ cells (e.g. Nayernia et al. 2006a, 2006b).

[0377] When the desired cell population is a germ cell population, the differentiation medium includes specific agents at concentrations promoting differentiation into germ cells (e.g. Nayernia et al. 2006a, 2006b).

[0378] In a preferred embodiment, when a germ cell population is the desired cell population, transfection/contacting with short numb isoform (and/or numblike) proteins or with sequences encoding short numb isoform proteins (and/or numblike), is accompanied or replaced by transient or permanent transfection/contacting with other proteins and/or nucleic acid sequences, including ones selected from those encoding FIGLA, FIG alpha, DAZL, STRA8, FOXL2, OOGENESIN1, OOGENESIN2, OOGENESIN3, OOGENESIN4, SYCP2, SYCP3, SPO11, REC8, DMC1, MOS, STAG3, CCNB1, FOXO1, FOXO3, SOHLH1, SOHLH2, NOBOX, OBOX1, OBOX2, OBOX3, OBOX4, OBOX6, LHX8, LHX9, OOG1, SP1, ZFP38, TRF2, TB2/TRF3, TAF4B, TAF7L, TAF71, TIA1, PHTF1, TNP2, HILS1, DAZL, BMP15, PTTG3, AURKC, OTX2, SOX15, SOX30, FOXR1, ALF, OCT4, DPPA3/STELLA, ZFP38, RPS6KA3, HINFP, NPAT, SP1, SP3, HOXA1, HOXA7, HEX, YP30, ZP1, ZP2, ZP3, SFE1, SFE9, OPO, PLN, RDV, GLD1, MMU-MIR351, MMU-MiR615, MMU-MIR592, MMU-MIR882, MMU-MIR185, MMU-MIR491, MMU-MiR326, MMU-MIR330, MMU-MIR351.

[0379] For example, but not limiting, in one preferred embodiment, when a sperm or spermatocyte cell population is the desired cell population, transfection/contacting with short numb isoform (and/or numblike) proteins or with sequences encoding short numb isoform proteins (and/or numblike), is accompanied or replaced by transient or permanent transfection/contacting with other proteins and/or nucleic acid sequences, including ones selected from those encoding SYCP2, SYCP3, SPO11, REC8, DMC1, MOS, STAG3, OCT4, ALF, RPS6KA3, HINFP, SP1, SP3, TAF71, TIA1, PHTF1, TNP2, HILS1, CLGN, TEKT1, FSCN3, DNAHC8, LDHC, ADAM3, OAZ3, AKAP3, MMU-MiR351, MMU-MIR615, MMU-MIR592, MMU-MIR882, and MMU-MIR185.

[0380] For example, but not limiting, in one preferred embodiment, when a oocyte cell population is the desired cell population, transfection/contacting with short numb isoform (and/or numblike) proteins or with sequences encoding short numb isoform proteins (and/or numblike), is accompanied or replaced by transient or permanent transfection/contacting with other proteins and/or nucleic acid sequences, including ones selected from those encoding MOS, CCNB1, OCT4, FIG alpha, FIGL alpha, ALF, SOHLH1, SOHLH2, LHX8, LHX9, OOG1, FIG alpha, SP1, LHX3, LHX9, TBP2/TRF3, DAZL, BMP15, GDF9, PTTG3, AURKC, OTX2, SOX15, SOX30, FOXR1, NOBOX, OBOX1, OBOX2, OBOX3, OBOX6, OOGENESIN1, OOGENESIN2, OOGENESIN3, OOGENESIN4, YP30, ZP1, ZP2, ZP3, SFE1, SFE9, OPO, PLN RDV, GLD1, DAZL, STRA8, MMU-MIR615, MMU-MIR491, MMU-MIR326, MMU-MIR330, MIR212 and MMU-MIR351.

[0381] When the desired cell population is an endoderm and pancreatic islet cell population, the differentiation media may include specific agents at concentrations promoting differentiation into endoderm and pancreatic islet cells (e.g. Xu et al., 2006; Denner et al., 2007; Shim et al., 2007; Jiang et al., 2007).

[0382] In a preferred embodiment, differentiation of selected cells and/or their progeny may occur in the differentiation medium in the absence of transfection with (or overexpression of) numblike, short Numb isoforms (or their corresponding proteins), although the differentiation medium may be unchanged.

[0383] In embodiments, a single vector will be utilized which controls the expression of nucleotide sequence(s) encoding the “long” (PRR+) isoform(s) of the mammalian numb gene (and/or synthetic oligonucleotides targeting numblike or the short numb isoforms) under one regulable promoter (e.g. a tetracycline-regulated promoter), while the Numblike and short Numb isoforms (and/or synthetic oligonucleotides targeting the long (PRR+) isoforms) are expressed under the control of another, distinct, but also regulable promoter. Thus, the long (PRR+) numb isoform(s) can be expressed (and/or short isoforms repressed) when expansion of the selected cells is desired and an inducing agent (e.g. tetracycline) is added to the growth medium; later numblike and the short isoforms can be expressed (and/or long (PRR+) numb isoform(s) repressed) when differentiation is desired.

[0384] Alternatively, proteins and peptides corresponding to Numb isoforms, Notch, OCT3/4, SOX2, and/or other DNA sequences listed herein may be applied in analogous fashion to selected cells and/or their progeny via electroporation (e.g. Koken et al., 1994; Ritchie and Gilroy, 1998), using nano particles, cationic lipids, fusogenic liposomes (e.g. Yoshikawa et al., 2005; 2007), etc. in lieu of, or in combination with genetic transfection. Generally, electroporation allows for high transfection efficiency (and efficient production of the desired cells) without genomic integration of the transgene and is therefore associated with increased safety.

[0385] The DNA or RNA encoding protein(s) or polypeptide(s) promoting proliferation, multipotentiality, pluripotentiality or differentiation of the selected cells may be isolated in accordance with standard genetic engineering techniques (for example, by isolating such DNA from a cDNA library of the specific cell line) and placing it into an appropriate expression vector, which then is transfected into the selected cells.

[0386] In another preferred embodiment, endoderm and pancreatic islet cells are the desired population, and transfection with (or overexpression of) sequences (or their corresponding proteins) encoding short numb isoforms (and/or numblike) is accompanied or replaced by transient or permanent transfection with (or overexpression of) other sequences (or their corresponding proteins) including one or more selected from those encoding Foxa2, Sox17, HLXB9, Ngn3, Mafa, Mapk, Stat3 and/or Pdx1.

[0387] In another preferred embodiment, hepatocytes are the desired population, and transfection with (or overexpression of) sequences (or their corresponding proteins) encoding short numb isoforms (and/or numblike) is accompanied or replaced by transient or permanent transfection with (or overexpression of) other sequences (or their corresponding proteins) including one or more selected from those encoding hepatic nuclear factor (HNF)-1, HNF-3, HNF-4, HNF-6, Foxa3, Foxa1, Foxa2 or Gata4, Cebpa, Cebpb, Atf5, c-myc and Prox1.

[0388] In another preferred embodiment, hematopoietic cells are the desired population, and transfection with (or overexpression of) sequences (or their corresponding proteins) encoding short numb isoforms (and/or numblike) is accompanied or replaced by transient or permanent transfection with (or overexpression of) other sequences (or their corresponding proteins) including one or more selected from those encoding Runx1/aml1, Nov(Ccn3), Erg, Gata2, Lmo2, Runx1c, Scl, Run1t1, Hlf, Prdm5, Pbx1, Zfp37, Mycn, Meis1, FOSB, GFI1, SPI1 and/or cell culture in the presence of colony stimulating factors specific for the desired cell populations.

[0389] The Runx1/AML1a isoform is introduced when engraftment Is desired and the b isoform when differentiation is desired (Creemers et al., 2006).

[0390] Further, when the desired hematopoietic cell is a progenitor cell population, the transfected or overexpressed sequences may include one or more selected from miR-128, miR-181, miR-16, miR-103 and miR-107.

[0391] Further, when the desired hematopoietic cell is a T lymphoid cell population, the transfected or overexpressed sequences may include miR-150.

[0392] Further, when the desired hematopoietic cell is a B lymphoid cell population, the transfected or overexpressed sequences may include one or more selected from miR-181, miR-155, miR-24, miR-17, miR-16, miR-103 and miR-107.

[0393] Further, when the desired hematopoietic cell is an erythroid cell population, the transfected or overexpressed sequences may include one or more selected from miR-150, miR-155, miR-221, miR-222, miR-451, miR-16 and miR-24.

[0394] Further, when the desired hematopoietic cell is a monocyte cell population, the transfected or overexpressed sequences may include one or more selected from miR-17-5p, miR-20a, miR-106a, miR-16, miR-103 and miR-107.

[0395] Further, when the desired hematopoietic cell is a granulocyte cell population, the transfected or overexpressed sequences may include one or more selected from miRNA-155, miR-24, miR-17, miR-223, miR-16, miR-103 and miR-107.

[0396] Further, when the desired hematopoietic cell is a megakaryocyte cell population, the transfected or overexpressed sequences may include one or more selected from miR-155, miR-24, and miR-17.

[0397] In another preferred embodiment, chondrocytes are the desired population, and transfection with (or overexpression of) sequences encoding short numb isoforms and/or numblike (or their corresponding proteins) is accompanied or replaced by transient or permanent transfection of other sequences (or their corresponding proteins) including one or more selected from ones encoding Sox9, CREB-binding protein, Gata6, Runx2, and TGF-beta.

[0398] In another preferred embodiment, bone cells (especially osteoblasts) are the desired population, and transfection with (or overexpression of) sequences encoding short numb isoforms and/or numblike (or their corresponding proteins) is accompanied or replaced by transient or permanent transfection of other sequences (or their corresponding proteins) including Runx2.

[0399] Further, when an osteoblast population is the desired cell population, transfection with (or overexpression of) sequences may include one or more small RNAs selected from miR-125b and miR-26a.

[0400] Further, when a keratinocyte population is the desired cell population, transfection with (or overexpression of) sequences may include one or more small RNAs selected from miR-203.

[0401] In a preferred embodiment, the genetic vectors encoding the long Numb isoforms (such as those described herein) are introduced transiently or under the control of a regulable promoter, into endogenous cells in vivo in order to cause those cells proliferate transiently.

[0402] In another embodiment, when i. brown adipocytes, ii. astrocytes, iii. endothelial cells, iv. macrophages/mocytes v. melanocytes, vi. neural stem cells, vii. glutamatergic neurons, viii. astrocytes, ix. motor neurons, or x. nephrogenic progenitors are desired cell population and transfection with (or overexpression of) sequences (or their corresponding proteins) encoding short numb isoforms (and/or numblike) is accompanied or replaced by transient or permanent transfection with (or overexpression of) other sequences (or their corresponding proteins) including one or more selected from i. PRDM16, and CEBPβ, or ii. Nfia, Nfib, and Sox9, iii. Etv2, Fli1, Erg1, Foxo1, Er71, Klf2, Tal1, and Lmo2, iv. Sox2, miR-125b, PU.1, CEBP and CEBPβ, v. Mitf, Sox10, Pax3, vi. Ascl1, Ngn2, Hes1, Id1, Pax6, Sox2, c-Myc, Brn2, Brn4, Klf4, c-Myc, and E47; vii. NeuroD1, Ascl1, Myt1l, Neurod2, miR-9/9, miR-124 viii. Ascl1, Ngn2 and Dlx2, ix. Brn2, Mash1, Myt1l, Lhx3, Hb9, Isl1, Ngn2, or Six1, Six2, Osr1, Eya1, Hoxa11, Snai2, respectively.

[0403] In a preferred embodiment, endogenous cells (e.g. ependymal zone cells of the central nervous system) are transfected in vivo with genetic vectors encoding either the shortest numb isoform or the numblike protein(s) alone or in conjunction with other transgenes (or their corresponding proteins) named herein, in order to transiently or permanently promote renewed or increased differentiation (especially neuronal differentiation) and migration of progenitor/ependymal cells in the central nervous system). This renewal or increase is measured in terms of the number of cells showing new-onset expression of markers associated with differentiation. This may be accomplished by introduction of the genetic vectors into the organ system using methods suitable for that purpose (see examples).

[0404] In a preferred embodiment, endogenous cells (e.g. ependymal zone cells of the central nervous system) are transfected in vivo with genetic vectors encoding the long numb isoform(s) and/or other transgenes (or their corresponding proteins) named herein, in order to transiently promote renewed or increased stem cell proliferation (with subsequent differentiation of progeny cells). This renewal or increase is measured in terms of the number of cells showing new-onset expression of markers associated with dividing progenitors. This may be accomplished by introduction of the genetic vectors into the organ system using methods suitable for that purpose (see examples).

[0405] Likewise, this approach is also be suitable for inducing renewed or increased differentiation from other stem cell populations in other tissues (such as the skin, etc.). This approach can be utilized, for example, clinically in the setting of central nervous system injury, disorders of other tissues where normal differentiation or migration are inadequate, dysplastic disorders and other disorders where the approach is beneficial.

[0406] In a preferred embodiment, in order to produce developmental activation, nucleic acid(s) or protein(s) corresponding to a single gene, or portion thereof, (particularly those named herein, discovered according to methods described herein, discovered according to other published methods; and/or known to be capable of initiating the desired manner of differentiation) are the only nucleic acid(s) or protein(s) overexpressed and/or introduced to initiate differentiation in the selected cells.

[0407] In a preferred embodiment, in order to produce developmental activation, nucleic acid(s) or protein(s) corresponding to a single gene, or portion thereof, (particularly those named herein, discovered according to methods described herein, discovered according to other published methods; and/or known to be capable of initiating the desired manner of differentiation) are the only nucleic acid(s) or protein(s) overexpressed and/or introduced to initiate differentiation in the selected cells and the method utilized is electroporation, liposomes, nanocapsules, nanovaults, and/or another approach avoiding retroviral/lentiviral integration or other random alteration of the cell's genome.

[0408] In a separate preferred embodiment, in order to produce developmental activation, other nucleic acid(s), protein(s) or other transfectants can be utilized in concert with the nucleic acid(s) or protein(s) corresponding to a single gene, or portion thereof, (particularly those named herein, discovered according to methods described herein, discovered according to other published methods; and/or known to be capable of initiating the desirable manner of differentiation) so long as a population of differentiating cells is produced from the selected cells.

[0409] In a separate preferred embodiment, in order to produce developmental activation, other nucleic acid(s), protein(s) or other transfectants can be utilized in concert with the nucleic acid(s) or protein(s) corresponding to a single gene, or portion thereof, (particularly those named herein, discovered according to methods described herein, discovered according to other published methods; and/or known to be capable of initiating the desirable manner of differentiation) so long as a population of differentiating cells is produced from the selected cells and the method utilized is electroporation, liposomes, nanocapsules, nanovaults, and/or another approach avoiding retroviral/lentiviral integration or other random alteration of the cell's genome.

[0410] It is to be understood that any combination of nucleic acids or proteins described herein can be modified by excluding those corresponding to Numb and/or Numblike so long as the desired cell population or behavior is achieved.

[0411] Similarly, it should be understood that the methods described herein (or elsewhere) for initiating differentiation are applicable to any induced or non-induced multipotent, pluripotent, or self-renewing stem cells, or other selected cells, not only those obtained in the manner described herein.

### Sources of Selected Cells

[0412] The population of selected cells may derive from various stem cells, progenitor cells and somatic cells. However somatic cells lacking nuclei (e.g. mature, human red blood cells) are specifically excluded. Selected stem cells may be derived from existing cell lines or isolated from stored, banked, or cryopreserved sources. Typical sources of stem cells include bone marrow, peripheral blood, placental blood, amniotic fluid (e.g. De Coppi et al., 2007), umbilical cord blood (e.g. Zhao, et al., 2006; Tian et al., 2007), adipose tissue (e.g. Gimble et al., 2007; Ma et al., 2007), non-human embryos, and others. Circulating leukocytes and other non-stem cells may likewise be selected and subjected to the same culture conditions as described above effective that they acquire multipotency, pluripotency and/or self-renewal as a result. Examples of other accessible somatic cells useful in this invention include lymphocytes and epithelial (e.g. buccal check) cells. Isolation and collection of cells selected for use within the present invention may be performed by any method known to the art.

[0413] In embodiments involving animals, stem cells isolated from prostate, testis, embryonic brain, and intestine are also disclosed as being preferred sources of selected cells.

[0414] In a preferred embodiment, the selected cells and/or their progeny are cultured in a three-dimensional format.

[0415] A further aim of the present invention is to provide cells for use in the production of patient-compatible and patient-specific tissues and organs for transplantation to patients or subjects deemed to be requiring such organs or tissues. It is disclosed herein that the pluripotent, multipotent, and/or differentiating cells provided by the methods described herein (or similar methods) be utilized in conjunction with techniques aimed at the production of such organs and/or tissues (e.g. Boland et al., 2006. Xu et al., 2006; Campbell and Weiss, 2007). Such utilization is specifically covered by the present invention.

[0416] For instance, pluripotent, multipotent, and/or differentiating cells produced or treated according to the methods described herein (or other published methods) may be grown in association with three-dimensional or two-dimensional scaffoldings engineered to replicate normal tissue structure and/or organ structures (e.g. Yarlagada et al., 2005; Kim et al, 1998; WO/2003/070084; EP1482871; WO03070084; U.S. Pat. Nos. 2,395,698; 7,297,540; 6,995,013; 6,800,753; Isenberg et al., 2006).

[0417] Similarly, scaffoldings to be occupied by the pluripotent, multipotent, and/or differentiating cells may be derived from cadaveric organ(s) or tissue(s) after the cadaveric organs or tissues (e.g. bone, heart, target tissue, organ or cavity, kidney, liver, lung, etc.) may be treated in such away that the host immune cells resident in that tissue, and other undesirable or ancillary host cells, are eliminated (e.g. by ionizing radiation, sterilization (e.g. Mroz et al., 2006), and/or various methods of decellularization (U.S. Pat. Nos. 6,734,018; 6,962,814; 6,479,064; 6,376,244; 5,032,508; 4,902,508; 4,956,178; 5,281,422, 5,554,389; 6,099,567; and 6,206,931; 4,361,552 and 6,576,618; 6,753,181; U.S. application Ser. No. 11/162,715; WO/2001/048153; WO/2002/024244; WO003002165; WO/2001/049210; WO/2007/025233; European Patents EP1482871; EP1246903; EP1244396; EP0987998; EP1244396; EP1333870; Rieder et al., 2004; Ott et al., 2008; Taylor et al., 1998)).

[0418] Likewise, it is anticipated that the pluripotent, multipotent, and/or differentiating cells of the present invention may be used in applications utilizing inkjet-style printing for tissue engineering (e.g. Boland et al., 2006. Xu et al., 2006; Campbell et al., 2007). Therefore, such use of the cells produced or treated according to the methods described herein is covered.

[0419] In another preferred embodiment, the selected cells and/or their progeny are cultured in hanging drops.

[0420] In accordance with another aspect of the present invention, selected cells may be modified genetically beforehand.

[0421] In accordance with another aspect of the present invention, selected cells may be modified with DNA or RNA encoding protein(s) or polypeptide(s) promoting differentiation of the cell into a desired cell population.

### Screening Cell Populations

[0422] In one embodiment, the methods of this invention comprise screening cells from cell lines, donor sources, umbilical cord blood, and autologous or donor bone marrow, blood, spermatogonia, primordial germ cells, buccal cheek cells, or any other cell source effective in the current invention.

[0423] Selected cells can be screened to confirm successful transfection with (or overexpression of) beneficial sequence(s) or therapeutic vector(s) as well as successful initiation of differentiation by any method known to the art (Guan et al., 2006; U.S. Pat. No. 6,432,711). In some embodiments, the cells are screened using standard PCR and nucleic acid hybridization-based methods or using rapid typing methods. In preferred embodiments, the cells are screened according to expression of reporter genes. In some embodiments, cells are screened by expression of a marker gene encoded by the transgene expressing vector(s) such as an antibiotic resistance gene or a fluorescent protein (e.g. GFP) gene.

### Screening for Therapeutic Vectors and Beneficial Sequences

[0424] Cells can be screened for the presence of beneficial sequence(s) and therapeutic vector(s) using any method(s) known to the art for detection of specific sequences. Each cell sample can be screened for a variety of sequences simultaneously. Alternatively, multiple samples can be screened simultaneously.

[0425] Cell differentiation may be monitored by several means including (i) morphological assessment, (ii) utilizing reverse transcriptase polymerase chain reaction (RT-PCR), Northern blot, or microarray techniques to monitor changes in gene expression, (iii) assaying cellular expression of specific markers such as beta tubulin III (for neurons) etc. (Ozawa, et al., 1985). In some embodiments, the cells are screened for successful initiation of differentiation using FACS sorting based on cell type specific markers or transgenic marker expression (e.g. antibiotic resistance or fluorescent protein expression) under the control of cell type specific promoters such as the myosin promoter in muscle cells; the human cardiac α-actin promoter in cardiomyocytes; the insulin promoter in insulin producing cells; the neuronal-specific enolase (NSE) promoter for neuronal differentiation, or neurotransmitter related promoters such as the tyrosine hydroxylase promoter in dopaminergic neurons; etc.).

[0426] In some embodiments, the cells are screened using standard PCR and nucleic acid hybridization-based methods. In a particularly preferred embodiment, the cells are screened using rapid typing methods.

### Screening for Human Leukocyte Antigen (HLA) Type

[0427] In certain embodiments, the selected cells are selected with respect to compatible HLA typing.

[0428] The HLA genotype can be determined by any means known to those of skill in the art.

[0429] The cells used for screening may consist of cells taken directly from a donor, or from cell lines established from donor cells, or other practicable cell sources. The cells can be screened for beneficial sequence(s), and/or therapeutic vector(s) and HLA type at once, or separately. Those cells successfully transfected with a beneficial sequence and showing an appropriate HLA genotype can be prepared for transplantation to a patient.

[0430] In certain embodiments, the transfected cells are transplanted without HLA typing. In other embodiments, the cells are HLA typed for compatibility.

### Screening for Agents Promoting a Cellular Phenotype.

[0431] The present invention also provides for a methods of screening proteins and agents for their ability to produce developmental activation of the selected cells and/or their progeny into desired cell populations. Briefly, vectors encoding complementary DNAs (cDNAs) from appropriate cDNA libraries are transfected into the selected cells/and or their progeny. Once a specific cDNA that induces differentiation or other phenotypic change is identified, such cDNA then may be isolated and cloned into an appropriate expression vector for protein production in appropriate cells (e.g. COS cells) in vitro. Later the protein containing supernatant can be applied to the selected cell cultures to determine if any secreted proteins from such cells induce differentiation. Alternatively, candidate agents can be applied to the selected cell cultures to determine if any of the candidates induce developmental activation.

[0432] The present invention also provides for methods of screening nucleic acids for their ability to induce multipotentiality, pluripotentiality, and/or self-renewal, or to initiate differentiation of selected cells and/or their progeny. In these methods, vectors encoding selected cDNAs (or cDNAs from appropriate cDNA libraries, or other sequences are introduced into the selected cells/and or their progeny using electroporation, nanocapsules, nanovaults, liposomes, retroviruses, lentiviruses, and/or any other practicable means of transfection. Once a specific cDNA that induces a phenotypic change, multipotentiality, pluripotentiality, and/or self-renewal, is identified, such cDNA then may be isolated and cloned into an appropriate expression vector.

[0433] Assays for determining such changes include those described elsewhere herein.

[0434] Likewise the protein corresponding to the identified cDNA may be produced in appropriate cells (e.g. COS cells) in vitro to determine whether the protein containing supernatant can be applied to the selected cell cultures and induce the desired changes.

[0435] Finally, proteins may be introduced into the selected cells/and or their progeny using electroporation, nanocapsules, nanovaults, liposomes, retroviruses, lentiviruses, and/or any other practicable means of transfection, and the resulting cells assessed as described herein for multipotency, pluripotentiality, self-renewal or the initiation of differentiation.

Transplantation of Cells into Patients or Subjects

[0436] After screening, selected cells and/or their progeny may be cryopreserved, maintained as cell lines in culture, or may be administered to the patient. Selected cells can be cryopreserved or maintained in culture by any means known to the art and preserved for future transplantation procedures.

[0437] Preferably, the cells to be screened are obtained from accessible sources allowing easy collection. With regard to producing HIV resistant cells: targeted somatic cells and stem cells of this invention can be of any type capable of differentiating into cells that can be infected by HIV, that can sustain the transcription and/or replication of HIV, that can alter the HIV immune response, or that can retard progression to AIDS. Such stem cells include, but are not limited to, pluripotent cells derived from spermatogonia, primordial germ cells, hematopoietic stem cells, peripheral blood cells, placental blood cells, amniotic fluid cells, umbilical cord blood cells, buccal check cells, adipose tissue cells (including stem cells derived from those tissues), reprogrammed cells, induced multipotent cells, induced pluripotent cells, etc., non-human embryos, and/or any other cell type that can form blood and immune cells, HIV target cells, and other cells.

[0438] Therapeutic vector(s) express “beneficial sequence(s)” intended to render transfected or infected cells less capable of sustaining HIV replication and transcription. The genetic vector expressing “beneficial sequence(s)” as well as any virus derived from such genetic vector, are herein termed “therapeutic vector”.

[0439] After screening, cells transfected with the desired therapeutic vector(s) and expressing beneficial sequence (with or without compatible HLA genotype) may be expanded ex vivo (in vitro) using standard methods to culture dividing cells and maintained as stable cell lines (U.S. Pat. Nos. 6,432,711 and 5,453,357 herein incorporated by reference). Alternatively, these cells can be administered to the patient and expanded in vivo.

[0440] Selected cells can be cryopreserved by any means known to the art and preserved for future transplantation procedures.

Transplantation of Desirable Cell Populations into Patients or Subjects

[0441] In certain embodiments, cell populations are enriched for stem cells prior to transplantation. Various methods to select for stem cells are well known in the art. For example, cell samples can be enriched by fluorescently labeled monoclonal antibodies recognizing cell-surface markers of undifferentiated hematopoietic stem cells (e.g., CD34, CD59, Thy1, CD38 low, C-kit low, lin-minus) for sorting via fluorescence-activated cell sorting (FACS).

[0442] In other embodiments, a sample of the selected cells is transplanted, without enrichment.

[0443] In some embodiments, the endogenous stem cells of the bone marrow are eliminated or reduced prior to transplantation of the therapeutic stem cells. Therapeutic stem cells are defined as those stem cells containing beneficial sequence(s) or therapeutic vector(s).

[0444] In some embodiments, the transplantation process may involve the following phases: (1) conditioning, (2) stem cell infusion, (3) neutropenic phase, (4) engraftment phase, and (5) post-engraftment period.

[0445] In some embodiments, the endogenous stem cells that normally produce the desired cells (e.g. bone marrow stem cells) are eliminated or reduced prior to transplantation. Chemotherapy, radiation, etc. and/or methods analogous to those described in U.S. Pat. No. 6,217,867 may be used to condition the bone marrow for appropriate engraftment of the transplant. Finally, therapeutic stem cells may be transplanted into the patient using any method known to the art.

### Sample Transgene Encoding Vectors

[0446] In one embodiment transfection with (or overexpression of) nucleic acid sequence(s) encoding transgenes is accomplished via viral transfection. The term “transgene encoding vector(s)” refers to the vectors incorporating the nucleic acid sequence(s) encoding transgenes named herein, especially encoding one or more transgenes named herein, as well as any additional sequences, synthetic oligonucleotides, etc., and any associated viral supernatant incorporating those vector sequences.

[0447] In one embodiment, the transgene encoding vector(s) comprise two or more transgenes named herein for producing developmental activation. See FIG. 1D.

[0448] The transgene encoding vector(s) may comprise an expression vector. Appropriate expression vectors are those that may be employed for transfecting DNA or RNA into eukaryotic cells. Such vectors include, but are not limited to, prokaryotic vectors such as, for example, bacterial vectors; eukaryotic vectors, such as, for example, yeast vectors and fungal vectors; and viral vectors, such as, but not limited to adenoviral (Lin et al., 2007) vectors, adeno-associated viral vectors, and retroviral vectors. Examples of retroviral vectors which may be employed include, but are not limited to, those derived from Moloney Murine Leukemia Virus, Moloney Murine Sarcoma Virus, and Rous Sarcoma Virus, FIV, HIV, SIV and hybrid vectors, including the episomal, integrase-deficient, non-integrating, 3^{rd} generation engineered lentiviral vectors described herein and/or described in references cited herein. Such vectors can be introduced safely without genomic integration or random alteration of the genome using electroporation and other methods taught herein.

[0449] It is disclosed that the transgene encoding vector(s) may be used to transfect cells in vitro and/or in vivo. Transfection can be carried out by any means known to the art, especially through virus produced from viral packaging cells. Such virus may be encapsidated so as to be capable of infecting a variety of cell types. Nevertheless, any encapsidation technique allowing infection of selected cell types and/or their progeny is practicable within the context of the present invention.

### Design of Human Immunodeficiency Virus (HIV) Gene Therapy Vector(s)

[0450] The “therapeutic vector(s)” may incorporate an expression vector. Appropriate expression vectors are those that may be employed for transfecting DNA or RNA into eukaryotic cells. Such vectors include, but are not limited to, prokaryotic vectors such as, for example, bacterial vectors; eukaryotic vectors, such as, for example, yeast vectors and fungal vectors; and viral vectors, such as, but not limited to adenoviral (Lin et al., 2007) vectors, adeno-associated viral vectors, and retroviral vectors. Examples of retroviral vectors which may be employed include, but are not limited to, those derived from Moloney Murine Leukemia Virus, Moloney Murine Sarcoma Virus, and Rous Sarcoma Virus, feline immunodeficiency virus (FIV), HIV, simian immunodeficiency virus (SIV) and hybrid vectors, including the replication incompetent, integrase-deficient, 3^{rd} generation, engineered, episomal, non-integrating lentiviral vectors (see FIG. 3D) described herein and/or described in references cited herein. Such vectors can be introduced safely without genomic integration or random alteration of the genome using electroporation and other methods taught herein.

[0451] It is disclosed herein that the therapeutic vector(s) may be used to transfect target cells in vitro and/or in vivo. Transfection can be carried out by any means known to the art, especially through virus produced from viral packaging cells. Such virus may be encapsidated so as to be capable of infecting CD34+ cells and/or CD4+ cells. However, in some instances, other cell types are transfected by means not involving the CD4 or CD34 proteins. Nevertheless, any encapsidation technique allowing infection of such cell types may therefore be included in the disclosure of the present invention.

[0452] Pseudotyping with different envelope proteins expands the range of host cells transducible by viral vectors and therapeutic vectors and allows the virus to be concentrated to high titers, especially when pseudotyped with the vesicular stomatitis virus envelope glycoprotein (VSV-G) (Li et al., 1998; Reiser et al., 2000).

### Vector Construction

[0453] Viral vectors utilized in this invention may be of various RNA and DNA virus types, including hybrid vectors. Vectors may, for instance, be third-generation lentiviral vectors which include only a very small fraction of the native genome (Zufferey et al., 1998). Production of transgene encoding vector(s) may also involve self-inactivating transfer vectors (Zufferey et al., 1998; Miyoshi et al., 1998) eliminating the production of full-length vector RNA after infection of target cells.

[0454] Viral vectors may be utilized which are replication-incompetent due to failure to express certain viral proteins necessary for replication. However, the possibility exists that helper virus may enable therapeutic virus replication. This likelihood can be reduced by the use of vectors that are self-inactivating, as well as replication-incompetent and non-integrating, as described in references cited herein.

[0455] In a preferred embodiment, transgene sequences are driven by a ubiquitin promoter, U6 promoter, EF1alpha promoter, CMV promoter, regulable promoters and/or desired cell type specific promoters.

[0456] The lack of a functional integrase gene in these vectors renders them integrase-deficient and episomal, and is the consequence of inserting the EGFP expression cassette consisting of EGFP sequences and the CMV IE promoter into the region normally occupied the gag-pol genes (FIG. 6A of Reiser et al., 2000; see FIG. 1D herein).

[0457] When cell transduction is mediated by virus (i.e. viral particles) pol deletion interferes with reverse transcription of viral RNA to DNA. Accordingly, pol deletion results in a non-integrating or integration deficient lentivector. This is because “Integrase . . . is involved in the reverse transcription of HIV-1 RNA and nuclear import of the pre-integration complex (PIC) (Gallay et al., 1997; Zhu et al., 2004; Philpott and Thraser, 2007).

[0458] However, when one skilled in the art chooses not to use infection and instead chooses electroporation to introduce DNA lentiviral vectors to the cells, as taught by the applicant, no reverse transcription is necessary; and because the pol gene is deleted, no integrase enzyme is present in the cell to support integration. It has been taught by Wanisch and Yanez-Munoz (2009) that,
[0459] “HIV-1 circles are considerably stable after infection, with progressive vector episome dilution due to cell division. Thus, the apparent decrease in circularized HIV-1 DNA after infection of CD4+MT-2 or SupT1 T-cells is the result of ongoing cell division causing the dilution of nonreplicating viral episomes in the cell population. Episomes are stable in macrophages for at least 21 days (ref. 36), while a turnover of episomes has been observed in vivo in human peripheral blood mononuclear cells over the course of several weeks, suggesting that they can be slowly degraded.” (Wanisch and Yanez-Munoz, 2009).

[0460] Accordingly, those skilled in the art recognize that integration deficient lentivectors may persist episomally for weeks or more after electroporation.

### Viral Tropism

[0461] In a preferred embodiment, virus derived from the transgene encoding vector(s), therapeutic vector(s) and/or other transgeneic vector(s) of this invention is pseudotyped with vesicular stomatitis virus envelope glycoprotein to enable concentration of the virus to high titers and to facilitate infection of CD34+ cells.

### Sequence Selection

[0462] The use of any sequence with 70% or greater identity (or complementarity) to any sequence referred to a transgene sequence named herein (searchable using the Entrez-Pubmed database) is covered by the invention if utilized in the manner described in the present invention.

[0463] The current invention also relates in part to a genetic vector that includes sequences capable of markedly reducing the susceptibility of mammalian cells to infection by HIV 1 and HIV-2 viruses (both together referred to herein as HIV).

[0464] The current invention discloses the novel combination of synthetic oligonucleotides to reduce the expression of genes critical to the HIV/AIDS disease process.

[0465] The desirability of combining synthetic oligonucleotides to effect co-receptor “knock down” with expression of TAR and RRE decoy sequences arises from the proposition, expressed herein, that combining multiple gene therapy approaches simultaneously targeting 1) HIV infection, 2) HIV transcription, and 3) HIV replication in individual cells is likely to produce superior therapeutic benefits than any of these approaches in isolation.

[0466] Therapeutic vector(s) express “beneficial sequence(s)” intended to render transfected or infected cells less capable of sustaining HIV replication and transcription. The genetic vector expressing “beneficial sequence(s)” as well as any virus derived from such genetic vector, are herein termed “therapeutic vector”.

[0467] The present invention is directed in part to the genetic modification of cells susceptible to infection by HIV or capable of propagating HIV. Such cells are herein termed “target cells”.

[0468] In one embodiment, a cell comprising a mutation or deletion in the CCR5 and/or CCRX4 co-receptors, and/or other co-receptors is developmentally-activated according to the methods described herein to provide pluripotent cells, pluripotent like cells, multipotent cells, hematopoietic progenitors and stem cells, T cells and/or macrophages such that the resulting T cells and macrophages were HIV-resistant.

[0469] In a further embodiment, the CCR5 mutation or deletion is a 32 base pair deletion or other rendering the CCR5 gene non-functional.

[0470] In a further embodiment, CRISPR/CAS9 or other site-directed mutational methods known to the art to produce mutation or deletion in the CCR5 and/or CCRX4 co-receptors.

[0471] The present invention also provides a composition and method for using therapeutic viral vectors to reduce the susceptibility of mature or immature target cells, leukocytes, blood cells, any stem/progenitor cells, and/or their progeny (including DAdC) to infection by HIV.

[0472] It follows that the present invention also provides a composition and method for using therapeutic viral vectors to reduce the susceptibility of developmentally activated cells, induced cells, reprogrammed cells, induced multipotent cells, induced pluripotent cells, and/or their progeny to infection by HIV.

[0473] It is a further objective of this invention to reduce the ability of mature or immature target cells, stem/progenitor cells, (including developmentally activated cells, induced cells, reprogrammed cells, induced multipotent cells, induced pluripotent cells) and/or their progeny to sustain immunodeficiency virus replication and transcription.

[0474] It is another objective of this invention to achieve efficient, long-term expression of the therapeutic sequences in mature or immature target cells, other quiescent cells, stem/progenitor cells, and/or their progeny.

[0475] In one aspect, this invention provides a method for preventing or treating HIV infection. The method involves transplanting stem cells transfected with therapeutic vector(s) or sequence(s), into patients or subjects with HIV infection.

[0476] Beneficial sequence(s) may be ones that reduce the ability of HIV to infect a cell, transcribe viral DNA, or replicate within an infected cell, or which enhances the ability of a cell to neutralize HIV infection.

[0477] In certain embodiments, the beneficial sequence(s) represent synthetic oligonucleotide(s) which interfere with HIV entry, including one or more selected from siRNA, shRNA, antisense RNA or miRNA directed against any of the HIV co-receptors (including, but not limited to, CXCR4, CCR5, CCR2b, CCR3, and CCR1).

[0478] In a preferred embodiment, the therapeutic vector(s) includes synthetic oligonucleotides targeting one or more HIV co-receptors including CXCR4, CCR5, CCR1, CCR2, CCR3, CXCR6 and/or BOB.

[0479] In another preferred embodiment the therapeutic vector(s) includes synthetic oligonucleotides targeting the major HIV co-receptors CXCR4 and CCR5

[0480] In a further preferred embodiment, the therapeutic vector(s) includes synthetic oligonucleotides targeting one or more HIV enzymes such as HIV reverse transcriptase, integrase and protease.

[0481] Appropriate sequences for the synthetic oligonucleotides are those 1) predictable by computer algorithms to be effective in reducing targeted sequences, and 2) capable of successfully reduce the amount of targeted enzyme by >70% in standard quantitative RNA assays and in assays of enzymatic activity or to a lesser but therapeutic degree.

[0482] The phrase “targeted sequence” indicates that a particular sequence has a nucleotide base sequence that has at least 70% identity to a viral genomic nucleotide sequence or its complement (e.g., is the same as or complementary to such viral genomic sequence), or is a corresponding RNA sequence.

[0483] In particular embodiments of the present invention, the term indicates that the sequence is at least 70% identical to a viral genomic sequence of the particular virus against which the oligonucleotide is directed, or to its complementary sequence.

[0484] Any of the various types of synthetic oligonucleotides may be expressed via therapeutic vector transfection, and the current invention is directed to all possible combinations of such oligonucleotides.

[0485] In a preferred embodiment, the synthetic oligonucleotide sequences are driven by target cell, specific promoter(s).

[0486] In another preferred embodiment, the synthetic oligonucleotide sequences are driven by U6 promoter(s).

[0487] Synthetic oligonucleotides, by the same token, may be included in the same therapeutic vector(s) with decoy RNA.

### Decoy RNA

[0488] Decoy RNA are sequences of RNA that are effective at binding to certain proteins and inhibiting their function.

[0489] In a preferred embodiment, the therapeutic vector(s) comprise(s) multiple decoy RNA sequences.

[0490] In a further embodiment the decoy RNA sequences are flanked by sequences that provide for stability of the decoy sequence.

[0491] In another preferred embodiment the decoy RNA sequences are RRE and/or TAR decoy sequences (or their corresponding proteins).

[0492] In a preferred embodiment, the RRE and TAR decoy sequences are HIV-2 derived TAR and RRE sequences (or their corresponding proteins).

[0493] In another preferred embodiment the decoy sequences also include Psi element decoy sequences (or their corresponding proteins).

[0494] In a preferred embodiment, the decoy sequences are each driven by a U6 promoter.

[0495] In another preferred embodiment, the decoy sequences are driven by target-cell specific promoters.

[0496] In a preferred embodiment, the therapeutic vector targets multiple stages of the HIV life cycle by encoding synthetic nucleotide sequence(s) in combination with HIV-2 TAR and/or RRE decoy sequences (or their corresponding proteins).

[0497] In another preferred embodiment, the vector includes miRNA oligonucleotide sequences (or their corresponding proteins).

[0498] In another preferred embodiment, the vector includes shRNA oligonucleotide sequences (or their corresponding proteins).

[0499] In another preferred embodiment, the vector includes siRNA oligonucleotide sequences (or their corresponding proteins). In another preferred embodiment, the vector includes RNAi oligonucleotide sequences (or their corresponding proteins).

[0500] In another preferred embodiment, the vector includes ribozyme sequences (or their corresponding proteins).

[0501] In another preferred embodiment, the vector includes a combination of synthetic oligonucleotide classes.

[0502] In a further embodiment, the synthetic nucleotide sequences target HIV co-receptors such as CCR5, CXCR4, etc.

[0503] In a further embodiment, the synthetic nucleotide sequences target HIV enzymes such as integrase, protease, reverse transcriptase, TAT, etc.

[0504] In a further embodiment, the ribozyme sequences target HIV co-receptors such as CCR5, CXCR4, etc., or HIV enzymes such as integrase, protease, reverse transcriptase, TAT, etc.

[0505] In a preferred embodiment, virus is generated using the therapeutic vector(s) and the virus is pseudotyped.

[0506] In a preferred embodiment, virus is generated using the therapeutic vector(s) and the virus is not pseudotyped and the virus shows native HIV tropism.

[0507] In a preferred embodiment, the therapeutic vector(s) is a viral vector.

[0508] In a preferred embodiment, the therapeutic vector(s) is a lentiviral vector.

[0509] In a preferred embodiment, the therapeutic vector(s) is a third-generation lentiviral vector.

[0510] In a preferred embodiment, the therapeutic vector(s) includes a combination of synthetic oligonucleotide classes.

[0511] In a preferred embodiment, synthetic nucleotide sequence expression is driven by the EF-1 alpha promoter or other target-cell appropriate promoters.

[0512] In a preferred embodiment, synthetic nucleotide sequence expression is driven by the U6 promoter or other target-cell appropriate promoters.

[0513] In a preferred embodiment, synthetic nucleotide sequence expression is driven by a combination of EF-1 alpha and U6, and/or other target-cell appropriate promoters.

[0514] In a preferred embodiment, EF-1 alpha drives miRNA expression while the U6 promoter drives RNA decoy expression.

[0515] In a preferred embodiment, EF-1 alpha drives siRNA sequence expression while the U6 promoter drives RNA decoy expression.

[0516] In a preferred embodiment, EF-1 alpha drives shRNA sequence expression while the U6 promoter drives RNA decoy expression.

[0517] In a preferred embodiment, the therapeutic vector(s) include synthetic oligonucleotides (e.g. multiple miRNA sequences)) directed against CXCR4, multiple sequences directed against CCR5, an HIV-2 RRE decoy sequence and an HIV-2 TAR decoy sequence, and the vector is a viral vector (see FIG. 15).

[0518] In a preferred embodiment, treatment involving the therapeutic vector(s) is combined with other modes of antiretroviral therapy including pharmacological therapies. Antiretroviral therapies appropriate for combination with the therapeutic vector(s) are those that have additive or synergistic effects in combination with the therapeutic vector.

[0519] Cells targeted for gene therapy in HIV may include, but are not necessarily be limited to, mature peripheral blood T lymphocytes, monocytes, tissue macrophages, T cell progenitors, macrophage-monocyte progenitor cells, and/or multipotent hematopoietic stem cells, such as those found in umbilical cord blood, peripheral blood, and occupying bone marrow spaces.

[0520] The present invention also relates to transfection of CD4+ T cells, macrophages, T cell progenitors, macrophage-monocyte progenitors, CD 34+ stem/progenitor cells and/or any other quiescent cell, dividing cell, stem cell or progenitor cell capable of differentiation in vitro or in vivo into HIV target cells, CD4+ T cells, macrophages, T cell progenitors, macrophage-monocyte progenitors, and/or CD 34+ stem/progenitor cells. Transfected cells, therefore, can be endogenous cells in situ, or exogenous cells derived from other body regions or even other individual donors. Cells selected for this purpose are herein termed “selected cells”.

[0521] By the same token, self-renewing, multipotent and/or pluripotent stem cells (including reprogrammed and induced pluripotent cells) represent another logical target for HIV gene therapy, and their use is specifically covered by the present invention.

[0522] In one embodiment of this process, selected cells (e.g. hematopoietic stem cells, skin stem cells, umbilical cord cells, primordial germ cells (PGCs), spermatogonia, any accessible somatic cell, etc.) are 1) propagated in culture using one or more cytokines such as steel factor, leukemia inhibitory factor (LIF), cardiotropin-1, IL-11, IL-6, IL-6 R, GP-130, CNTF, IGF-1, bFGF, and/or oncostatin-M and 2) transfected with the therapeutic vector(s) or beneficial sequence(s) prior to differentiation using any methods known to the art, such as those described in U.S. Pat. No. 5,677,139 herein incorporated by reference, or by methods analogous to U.S. Pat. No. 5,677,139 with respect to other target cells.

[0523] In separate embodiments, it may be desirable to perform the various steps prior to transfection.

[0524] In separate embodiments, for the purpose of generating pluripotent stem cell populations, it may be desirable to perform only the incubation steps above.

[0525] Appropriate concentrations of LIF and steel factor for stem/progenitor cell propagation/proliferation as well as other cell culture conditions have been described previously (e.g. U.S. Pat. Nos. 6,432,711 and 5,453,357 herein incorporated by reference). Other appropriate protocols and reference cytokine concentrations have been taught by Koshimizu et al., 1996; Keller et al., 1996; Piquet-Pellorce, 1994; Rose et al., 1994; Park and Han, 2000; Guan et al., 2006; Dykstra et al., 2006).

[0526] The population of target cells may include somatic cells, stem cells and progenitor cells. Stem cells may be derived from existing cell lines or isolated from stored, banked, or cryopreserved sources.

[0527] Typical sources of stem cells include marrow, peripheral blood, placental blood, amniotic fluid, umbilical cord blood, adipose tissue, non-human embryos, etc.

[0528] Somatic cells, especially circulating leukocytes and other non-progenitor/stem cells may likewise be subjected to the same culture conditions as described above for stem/progenitor cells effective that they acquire stem/progenitor cell properties as a result.

[0529] The invention also discloses the production (e.g. US Patent Application 20030099621) of target cells from stem/progenitor cells that may be made relatively resistant to HIV infection and/or HIV replication.

[0530] It is understood, however, that any method of differentiating previously propagated stem/progenitor/leukocyte cells into the desired target cells may be employed within the scope of the invention so long as functional target cells relatively resistant to HIV infection and/or HIV replication/and/or HIV transcription are produced.

[0531] In a preferred embodiment, the therapeutic viral vector is packaged with one or more envelope proteins from native HIV viruses conferring upon the therapeutic virus the capacity to infect any cell that native HIV strains are capable of infecting.

[0532] Cells selected for use in this invention will be in some instances accessible (e.g. umbilical cord stem cells, bone marrow stem cells, spermatogonia and primordial germ cells of the testis, stem cells isolated from amniotic fluid, stem cells isolated from the skin, etc.). Such cells can be isolated from the tissues in which they reside by any means known to the art.

[0533] Other selected cells may comprise reprogrammed cells, induced multipotent cells, induced pluripotent cells, etc.

[0534] In accordance with an aspect of the present invention, there is provided a method of producing a desired cell line, cell type, or cell class from the selected cells. Generally, the method comprises culturing the selected cells and/or their progeny under conditions which promote growth of the selected cells at an optimal growth rate. The resulting cell population is then cultured under conditions which promote cell growth at a rate which is typically less than the optimal rate, and in the presence of an agent promoting differentiation of the cells into the desired cell line, cell type, or cell class (e.g. CD4+ T cells).

[0535] The present invention also discloses the propagation of the selected cells and/or their progeny in culture, before or after transfection with (or overexpression of) the therapeutic vector, by any means known to the art (e.g. US Patent Application 20060099177). Such methods also include incubation with LIF, steel factor, Il-6, IL-7, oncostatin-M and/or cardiotropin-1 and other growth enhancing cytokines, etc.

[0536] The present invention further discloses the directed differentiation of cells transfected with the therapeutic vector(s) into desired cell types by further incubation in media containing the appropriate cytokines and growth factors such as colony stimulating factors such as M-CSF (CSF-1), GM-CSF, IL-7, any cytokine promoting CD4+ T cell differentiation, etc.

### Transfection

[0537] Genetic modification of selected cells and target cells, whether they be exogenous cells or endogenous cells can be performed according to any published or unpublished method known to the art (e.g. U.S. Pat. Nos. 6,432,711, 5,593,875, 5,783,566, 5,928,944, 5,910,488, 5,824,547, CRISPR/CAS9, etc.) or by other generally accepted means.

[0538] Suitable methods for transforming host cells can be found in Sambrook et al. (Molecular Cloning: A Laboratory Manual, 2nd Edition, Cold Spring Harbor Laboratory press (1989)), and other laboratory textbooks.

[0539] Successfully transfected cells can be identified by selection protocols involving markers such as antibiotic resistance genes in addition to RNA expression assays and morphological analyses.

[0540] Clones from successfully transfected cells, expressing the appropriate exogenous DNA at appropriate levels, can be preserved as cell lines by cryopreservation (utilizing any appropriate method of cryopreservation known to the art).

[0541] Selectable markers (e.g., antibiotics resistance genes) may include those which confer resistance to drugs, such as G418, hygromycin, ampicillin and blasticidin, etc. Cells containing the gene of interest can be identified by drug selection where cells that have incorporated the selectable marker gene survive, and others die.

[0542] A theoretical basis for the embodiments of the invention is described herein, however, this discussion is not in any way to be considered as binding or limiting on the present invention. Those of skill in the art will understand that the various embodiments of the invention may be practiced regardless of the model used to describe the theoretical underpinnings of the invention.

[0543] The invention will now be described and illustrated with respect to the following examples; however, the scope of the present invention is not intended to be limited thereby.

### Example 1: Construction of the Transgenic Vectors Suitable for Use in the Present Invention

[0544] Suitable EGFP-Numb and EGFP-Numblike, and EGFP-X lentiviral vectors (where X is any transgene described in the present invention) can be produced by cloning into an appropriate viral vector (e.g. the two-gene HIV-EGFP-HSA vector (Reiser et al., 2000)). Adapter primers can be selected for PCR amplification of Numblike and Numb isoform cDNAs and cloning into a genetic vector. In preparation for cloning, the gene vector is digested with enzymes. Subsequently, the cDNA for each transgene is inserted into the nef coding region previously occupied by the HSA cDNA-EGFP (enhanced green fluorescent protein) and a cell population-appropriate promoter (e.g. CMV ie or EF1alpha) having been previously inserted into the viral, gag-pol coding region. The lack of a functional integrase gene in these vectors renders them integrase-deficient and episomal, and is the consequence of inserting the EGFP expression cassette consisting of EGFP sequences and the CMV IE promoter into the region normally occupied the gag-pol genes (FIG. 6A of Reiser et al., 2000; see FIG. 3D herein). Such integrase-deficient vectors can be readily introduced using a variety of standard transfection techniques (e.g. electroporation, chemically mediated transfection, fusogenic or non-fusogenic liposomes, lipofectamine, nanocapsules, nanovaults, etc.)—methods which allow high capacity integrase-deficient lentiviral vectors to be utilized without genomic integration and random alteration of the genome.

[0545] When cell transduction is mediated by virus (i.e. viral particles) pol deletion interferes with reverse transcription of viral RNA to DNA. Accordingly, pol deletion results in a non-integrating or integration deficient lentivector. This is because “Integrase . . . is involved in the reverse transcription of HIV-1 RNA and nuclear import of the pre-integration complex (PIC) (Gallay et al., 1997; Zhu et al., 2004; Philpott and Thraser, 2007).

[0546] However, when one skilled in the art chooses not to use infection and instead chooses electroporation to introduce DNA lentiviral vectors to the cells, as taught by the applicant, no reverse transcription is necessary; and because the pol gene is deleted, no integrase enzyme is present in the cell to support integration. It has been taught by Wanisch and Yanez-Munoz (2009) that, “HIV-1 circles are considerably stable after infection, with progressive vector episome dilution due to cell division. Thus, the apparent decrease in circularized HIV-1 DNA after infection of CD4+MT-2 or SupT1 T-cells is the result of ongoing cell division causing the dilution of nonreplicating viral episomes in the cell population. Episomes are stable in macrophages for at least 21 days (ref. 36), while a turnover of episomes has been observed in vivo in human peripheral blood mononuclear cells over the course of several weeks, suggesting that they can be slowly degraded” (Wanisch and Yanez-Munoz, 2009).

[0547] Accordingly, those skilled in the art recognize that integration deficient lentivectors may persist episomally for weeks or more after electroporation.

[0548] Genetic constructs may include a vector backbone, and a transactivator which regulates a promoter operably linked to heterologous nucleic acid sequences (or their corresponding proteins).

[0549] Examples of retroviral vectors which may be employed include, but are not limited to, those derived from Moloney Murine Leukemia Virus, Moloney Murine Sarcoma Virus, and Rous Sarcoma Virus, FIV, and HIV. Appropriate expression vectors are those that may be employed for transfecting DNA or RNA into eukaryotic cells. Such vectors include, but are not limited to, prokaryotic vectors such as, for example, bacterial vectors; eukaryotic vectors, such as, for example, yeast vectors and fungal vectors; and viral vectors, such as, but not limited to, lentiviral vectors, adenoviral (Lin et al., 2007) vectors, adeno-associated viral vectors, and retroviral vectors. See FIG. 1 as well as U.S. Provisional Application Ser. No. 60/932,020, filed May 29, 2007, U.S. Provisional Application Ser. No. 60/933,133, filed Jun. 5, 2007, U.S. Provisional Application Ser. No. 60/933,670, filed Jun. 8, 2007, U.S. Provisional Application Ser. No. 61/006,449, filed Jan. 14, 2008, U.S. Provisional Application Ser. No. 61/064,761, filed Mar. 25, 2008.

[0550] The replication incompetent pcDNA 6.2/EmGFP-Bsd/V5-DEST vector is an example of an appropriate expression vector (Invitrogen) and allows expression of synthetic oligonucleotides (e.g. miRNAs) transferred from the pcDNA 6.2 GW/miR vector that have the capacity to cleave targeted sequences (or their corresponding proteins). These vectors include flanking and loop sequences from endogenous miRNA to direct the excision of the engineered miRNA from a longer Pol II transcript (pre-miRNA).

[0551] Combining multiple miRNA sequences directed against specific endogenous RNA species increases the likelihood of success in reducing target sequence expression. miRNA sequences may be operably linked to regulable or tissue specific promoters.

[0552] By utilizing lentiviral vectors for gene expression, the resulting transgene encoding vector(s) and/or other transgenic vector(s) of this invention, becomes capable of stably transducing both dividing and non-dividing cell types.

[0553] Moreover, 2nd and 3d generation, integrase-deficient lentiviral vectors provide a non-integrating, episomal vector suitable, along with adenoviral (Lin et al., 2007), AAV, hybrid vectors, plasmid DNA, etc. for use in the present invention. (See FIG. 1D).

[0554] In a preferred embodiment, the resulting Numb/Numblike encoding vector(s), and/or other transgenic vector(s) of this invention contain multiple synthetic oligonucleotide sequences driven by one or more promoters so as to reduce expression of specific numb isoforms and/or numblike (FIG. 3D).

### Example 2: Another Example of a Suitable Vector is a Retroviral Vector

[0555] Retroviruses are RNA viruses that contain an RNA genome. The gag, pol, and env genes are flanked by long terminal repeat (LTR) sequences (or their corresponding proteins). The 5′ and 3′ LTR sequences promote transcription and polyadenylation of mRNAs.

[0556] The retroviral vector may provide a regulable transactivating element, an internal ribosome reentry site (IRES), a selection marker, and a target heterologous gene operated by a regulable promoter.

[0557] Alternatively, multiple sequences may be expressed under the control of multiple promoters. Finally, the retroviral vector may contain cis-acting sequences necessary for reverse transcription and integration. Upon infection, the RNA is reverse transcribed to DNA that integrates efficiently into the host genome. The recombinant retrovirus of this invention is genetically modified in such a way that some of the retroviral, infectious genes of the native virus have been removed and in certain instances replaced instead with a target nucleic acid sequence for genetic modification of the cell. The sequences may be exogenous DNA or RNA, in its natural or altered form.

### Example 3: Example Methods for Generation of Numb/Numblike Encoding Vector(s), and/or Other Transgenic Vector(s) of this Invention

[0558] The methods for generation of the resulting Numb/Numblike encoding vector(s), and/or other transgenic vector(s) of this invention include those taught in Invitrogen's Viral Power Lentiviral Expression Systems Manual, 2007. Briefly, the EmGFP-bsd cassette is cloned as a PmlI-BlpI fragment into the pLenti6/R4R2/V5-DEST vector, while the miR-long (PRR+) numb isoform or miR-short numb isoform/numblike cassettes are simultaneously transferred by BP reaction into pDONR221. Then the regulable promoter(s) and miR-isoform cassettes are Multi-site LR crossed into the modified pLenti6/EmGFP-bsd/R4R2-DESTvector.

[0559] Multiple vectors can be generated in this manner comprising different combinations of synthetic oligonucleotides and transgene cassettes.

[0560] The pLenti6/R4R2/V5-DEST vector sequence corresponds to (SEQ ID NO: 1).

### Example 4: Additional Methods for Generation of Therapeutic Vector(s)

[0561] “Packaging cell lines” derived from human and/or animal fibroblast cell lines result from transfecting or infecting normal cell lines with viral gag, pol, and env structural genes. On the other hand, packaging cell lines produce RNA devoid of the psi sequence, so that the viral particles produced from packaging cell do not contain the gag, pol, or env genes. Once the therapeutic vector's DNA containing the psi sequence (along with the therapeutic gene) is introduced into the packaging cell, by means of transfection or infection, the packaging cell may produce virions capable of transmitting the therapeutic RNA to the final target cell (e.g. a CD4+ cell).

[0562] The “infective range” of the therapeutic vector(s) is determined by the packaging cell line. A number of packaging cell lines are available for production of virus suitable for infecting a broad range of human cell types. These packaging cell lines are nevertheless generally capable of encapsidating viral vectors derived from viruses that in nature usually infect different animal species. For example, vectors derived from SIV or MMLV can be packaged by GP120 encapsidating cell lines.

[0563] An example protocol for producing a therapeutic viral supernatant is provided as follows:
[0564] 1. Twenty micrograms of retrovirus vector are mixed with 2-3 micrograms of viral DNA containing the selectable marker gene (e.g. antibiotic resistance gene) by gentle tapping in 0.8-1 milliliter of Hepes buffered saline (pH=7.05) in a 1.5 ml plastic tube.
[0565] 2. Seventy microliters of 2M CaCl2 are added to the mixture by repeated gentle tapping.
[0566] 3. When a blue precipitate first begins to appear within the tube, the product should be gently applied to a 30% confluent layer of packaging cells (from any number of commercial vendors). The DNA mixture should be applied only after first removing the medium from the packaging cells.
[0567] 4. The packaging cells are set to incubate for 20-30 minutes at room temperature (25 degrees Celsius) before transferring them back to an incubator at 36-38 degrees Celsius for 3.5 hours.
[0568] 5. Add 3.5-4 milliliters of Hepes buffered saline containing 15% glycerol for 3 minutes then wash cell with Dulbecco's Modified Eagle's Medium (DMEM)+10% FBS×2.
[0569] 6. Add back DMEM+10% FBS, and incubate cells for 20 hours at 37 degrees Celsius.
[0570] 7. Remove and filter medium containing therapeutic viral particles.

[0571] Excess viral supernatant is immediately stored or concentrated and stored at −80 degrees Celsius). Supernatant may be stored with 5-8 micrograms of polybrene to increase the efficiency of target cell infection. Otherwise polybrene may be excluded or added just before infection.
[0572] 8. Stable producer lines can be established by splitting packaging cell lines 1 to 20, or 1 to 40 and subsequently incubating these cells for up to 10 days (changing medium every three days) in medium containing selective drugs (e.g. certain antibiotics corresponding to transfected resistance genes).
[0573] 9. After 10 days isolated colonies are picked, grown-up aliquoted and frozen for storage.

[0574] Assay of Retrovirus Infectivity/Titration is achieved by application of a defined volume of viral supernatant to a layer of confluent “test” cells such as NIH 3T3 cells plated at 20% confluence. After 2-3 cell division times (24-36 hours for NIH 3T3 cells) colonies of “test” cells incubated at 37 degrees in antibiotic-containing medium are counted. The supernatant's titer are estimated from these colony counts by the following formula:

Colony Forming Units/ml=colonies identified×0.5(split factor)/volume of virus (ml)

[0575] The accuracy of this estimate is increased by testing large volumes of supernatant over many plates of “test” cells.

[0576] Application of the therapeutic viral supernatant to target cells may be accomplished by various means appropriate to the clinical situation.

### Example 5: Growth Medium for Selected Cells

[0577] Selected cells can be expanded/grown in Dulbecco's modified Minimal Essential Medium (DMEM) supplemented with glutamine, beta-mercaptoethanol, 10% (by volume) horse serum, and human recombinant Leukemia Inhibitory Factor (LIF). LIF replaces the need for maintaining selected cells on feeder layers of cells, (which may also be employed) and is essential for maintaining selected cells in an undifferentiated, multipotent, or pluripotent state, such cells can be maintained in Dulbecco's modified Minimal Essential Medium (DMEM) supplemented with glutamine, beta.-mercaptoethanol, 10% (by volume) horse serum, and human recombinant Leukemia Inhibitory Factor (LIF). The LIF replaces the need for maintaining cells on feeder layers of cells, (which may also be employed) and is essential for maintaining cells in an undifferentiated state (per U.S. Pat. No. 6,432,711).

[0578] In order to initiate the differentiation of the selected cells into neuronal cells, the cells are trypsinized and washed free of LIF and placed in DMEM supplemented with 10% fetal bovine serum (FBS). After resuspension in DMEM and 10% FBS, 1×106 cells are plated in 5 ml DMEM, 10% FBS, 0.5 microM retinoic acid in a 60 mm Fisher bacteriological grade Petri dishes, where the cells are expected to form small aggregates. Aggregation aids in proper cell differentiation. High efficiency transfection with (or overexpression of) appropriate neuronal transcription factors and small RNAs can occur before or after plating in DMEM, FBS, and retinoic acid. (See U.S. Pat. Nos. 6,432,711 and 5,453,357 for additional details).

### Example 6: HLA Matching

[0579] Selected cells (e.g. umbilical cord blood or cells from any other suitable source and/or their progeny), can be screened, genetically-modified (optional), expanded, and induced to begin differentiating into the desired cell type(s) (optional). The cells are then transplanted according to standard stem cell transplantation protocols. In certain instances, cells may be transplanted into patients or subjects without HLA matching.

### Example 7

[0580] In some rare instances, it may be appropriate to introduce transgene encoding vectors into patients or subjects in order to stimulate or inhibit cellular division or cellular differentiation, in vivo (e.g. in cancer).

### Example 8: Genetic Modification of Selected Cells

[0581] In vitro genetic modification of exogenous cells or patient's endogenous cells can be performed according to any published or unpublished method known to the art (e.g. U.S. Pat. Nos. 6,432,711, 05,593,875, 05,783,566, 5,928,944, 05,910,488, 05,824,547, etc.) or by other generally accepted means. Suitable methods for transforming host cells can be found in Sambrook et al. (Molecular Cloning: A Laboratory Manual, 2nd Edition, Cold Spring Harbor Laboratory press (1989)), and other laboratory textbooks.

[0582] Successfully transfected cells are identified by selection protocols involving markers such as antibiotic resistance genes in addition to RNA expression assays and morphological analyses. Clones from successfully transfected cells, expressing the appropriate exogenous DNA at appropriate levels, can be preserved as cell lines by cryopreservation (utilizing any appropriate method of cryopreservation known to the art).

[0583] Selectable markers (e.g., antibiotic resistance genes) may include those conferring resistance to drugs, such as G418, hygromycin and methotrexate. Cells containing the gene of interest can be identified by drug selection where cells that have incorporated the selectable marker gene survive, and others die.

[0584] The current invention discloses the selection of genetically-modified cells as “selected cells” of the invention. The term genetic modification refers to alteration of the cellular genotype by introducing natural or synthetic nucleic acids into selected cells and/or their progeny or immortalized cell lines and/or their progeny by any means known to the art. Alternatively culture conditions that induce permanent changes in gene expression patterns are considered herein to represent genetic modification. Modification of stem cells, whether they be derived from the host brain, endogenous donor sources, exogenous donor sources, or cell lines, represents a feasible approach to the treatment of certain human diseases, especially those of the human nervous system.

[0585] Genetic modifications covered by this disclosure include, but are not limited to: genetic modifications performed in vivo; modifications that alter the activity or amount of metabolic enzymes expressed by endogenous or exogenous selected cells and/or their progeny; modifications which alter the activity, amount, or antigenicity of cellular proteins; modifications which alter the activity or amount of proteins involved in signal transduction pathways; modifications which alter HLA type; modifications which alter cellular differentiation; modifications which alter neoplastic potential; modifications which alter cellular differentiation; modifications which alter the amount or activity of structural proteins; modifications which alter the amount or activity of membrane associated proteins (structural or enzymatic); modifications which alter the activity or amount of proteins involved in DNA repair and chromosome maintenance; modifications which alter the activity or amount of proteins involved in cellular transport; modifications which alter the activity or amount of enzymes; modifications which alter the activity or amount of proteins involved in synapse formation and maintenance; modifications which alter the activity or amount of proteins involved in neurite outgrowth or axon outgrowth and formation; modifications altering the amount or activity of antioxidant producing enzymes within the cell; modifications which lead to altered post-translational modification of cellular proteins; modifications which alter the activity or amount of proteins involved in other aspects of cellular repair, and alterations which increase the lifespan of the cell (such as production of telomerase). Such proteins as those mentioned above may be encoded for by DNA or RNA derived from the human genome or other animal, plant, viral, or bacterial genomes. This invention also covers sequences (or their corresponding proteins) designed de novo.

[0586] In addition, this invention relates to the in situ, genetic modification of selected cells and/or their progeny cells for the treatment of disease. Endogenous stem cells may be modified in situ by direct injection or application of DNA or RNA vectors, including viruses, retroviruses, liposomes, etc., into the substance of the tissue or into the appropriate portion of the ventricular system of the brain.

[0587] Since 1992, we have modified thousands of stem/progenitor cells and many thousand progeny cells in this manner. Our data shows that this manner of modifying progenitor cells results in a tremendous variety of modified cell types throughout the nervous system, and has never resulted in adverse effects.

### Example 9: Introduction of Genetic Vectors into the Host

[0588] In a preferred embodiment, endogenous cells are transfected with vectors such as those described herein in vivo by introduction of the therapeutic vector(s) into the host blood, tissues, nervous system, bone marrow, etc. The greatest benefit may be achieved by modifying a large number of endogenous target cells. This may be accomplished by using an appropriately-sized, catheter-like device, or needle to inject the therapeutic vector(s) into the venous or arterial circulation, into a specific tissue, such as muscle tissue, or into the nervous system. In a preferred embodiment, the virus is pseudotyped with VSV-G envelope glycoprotein and native HIV-1 env proteins.

### Example 10: Injection into the Nervous System

[0589] Transplantation of selected cells (from either the growth or differentiation media) into the fetal nervous system or genetic modification of endogenous fetal cells utilizing genetic vectors may be accomplished in the following manner: Under sterile conditions, the uterus and fetuses are visualized by ultrasound or other radiological guidance. Alternatively, the uterus may be exposed surgically in order to facilitate direct identification of fetal skull landmarks. Selected cells can then be introduced by injection (using an appropriately-sized catheter or needle) into the ventricular system, germinal zone(s), or into the substance of the nervous system. Injections may be performed in certain instances, through the mother's abdominal wall, the uterine wall and fetal membranes into the fetus. The accuracy of the injection is monitored by direct observation, ultrasound, contrast, or radiological isotope-based methods, or by any other means of radiological guidance known to the art.

[0590] Under appropriate sterile conditions, direct identification of fetal skull landmarks is accomplished visually as well as by physical inspection and palpation coupled with stereotaxic and radiologic guidance. Following cell culture, appropriate amounts of the selected or differentiating cells can then be introduced by injection or other means into the ventricular system, germinal zones, or into the substance of the nervous system. The accuracy of the injection may be monitored by direct observation, ultrasound, or other radiological guidance.

[0591] In certain, neurological diseases of the adult nervous system, such as Huntington's disease and Parkinson's disease, cells of a specific portion of the brain are selectively affected. In the case of Parkinson's disease, it is the dopaminergic cells of the substantia nigra. In such regionally-specific diseases affecting adults, localized transplantation of cells may be accomplished by radiologically-guided transplantation of differentiating cells under sterile conditions. Radiologic guidance may include the use of CT and/or MRI, and may take advantage of contrast or isotope based techniques to monitor injected materials.

[0592] In certain neurologic diseases, such as some metabolic storage disorders, cells are affected across diverse regions of the nervous system, and the greatest benefit may be achieved by genetically-modifying endogenous cells or introducing selected cells of the present invention (either from the growth culture media or the differentiating medium) into the tissue in large numbers in a diffuse manner. In the nervous system, these diseases may be best approached by intraventricular injections (using an appropriately-sized, catheter-like device, or needle), especially at early stages of development, which allows diffuse endogenous cell modification or diffuse engraftment of selected cells isolated from the growth and/or differentiation media.

[0593] Nevertheless, injection of the cells into the circulatory system for the same purpose is also covered. However, with regard to any disorder affecting multiple organs or the body diffusely (e.g. lysosomal storage disorders, hemoglobinopathies, muscular dystrophy), the cells isolated from the growth and/or differentiation media may also be preferentially introduced directly into the circulation and/or visceral organs, such as the liver, kidney, gut, spleen, adrenal glands, pancreas, lungs, and thymus using endoscopic guidance and any appropriately-sized, catheter-like device, allowing diffuse engraftment of the cells throughout the body, as well as specific introduction and infiltration of the cells into the selected organs.

### Example 11: Delivery of Cells by Injection into the Circulatory Stream and Organs

[0594] Diseases of one organ system may be treatable with genetically modified cells from a separate organ system. Also, in some instances, it may become apparent that the selected cells may integrate and differentiate on their own, in vivo, in sufficient numbers if they are injected into blood stream either arterial, venous or hepatic, after culturing in the growth and/or differentiation media. This approach is covered by the present invention. The treatment of diffuse muscle (e.g. muscular dystrophies), organ, tissue, or blood disorders (e.g. Hereditary Spherocytosis, Sickle cell anemia, other hemoglobinopathies, etc.,) may, for instance, involve the injection of cells isolated from the growth media or differentiating media into the patient, especially the patient's circulation. This approach is also believed to ameliorate ischemic injuries such as myocardial infarction, stroke, etc., as well as traumatic injuries to brain and other tissues. Injection of such cells produced by the current invention, directly into the circulation, by needle or catheter, so that the cells are enabled to “home” to the bone marrow, muscle, kidneys, lungs, and/or any other organ system, as well as injection directly into the bone marrow space is suitable for the practice of the present invention. Likewise, injection of the cells directly into a lesion site with or without radiologic, ultrasonic or fluoroscopic guidance is also suitable for the practice of the present invention.

[0595] Methods of isolating selected cells useful in the present invention include those described by Zhao et al., 2006.

[0596] In a preferred embodiment, genetic vectors encoding numblike and/or numb isoforms comprise regulable promoters operably linked to the Numb or numblike transgenes (or their corresponding proteins).

[0597] In another preferred embodiment, the mode of transfection may be selected from those modes of transfection that provide for transient rather than permanent expression of the numblike and numb isoforms.

### Example 12. Example Genetic Modifications

[0598] Hundreds of diseases and clinical conditions are able to be treated and/or ameliorated by the methods of the present invention wherein a gene deficient in a patient is replaced or corrected by heterologous cells provided according to the present invention, or by autologous cells provided according to the present invention having the deficient gene replaced or repaired by genetic modification methods. Further, the transgenes, and vectors of the present invention may be delivered in vivo. Finally, proteins, including CRISPR/CAS9 related proteins, may be delivered by electroporation in vivo or in vitro, as taught herein. Examples of diseases amenable to such correction, replacement or repair include, but in no way are limited to, Canavan's disease (ASP); Tay-Sachs disease (HEXA); Lesch-Nyhan syndrome (HRPT); Huntington's disease(HTT); Sly syndrome; type A and type B Niemann Pick disease; Sandhoff's disease (HEXB); Fabry's disease (GLA); type C Niemann-Pick disease (NPC1); Gaucher's disease (GBA); Parkinson's disease(PARK2, etc.); Von Hippel Lindau's disease, Sickle cell anemia (HBB) and other thalassemias as well as similar diseases. These transgenes may represent the coding region or portions of the coding region of the normal genes.

[0599] It is to be understood, however, that the scope of the present invention is not to be limited to the specific embodiments and examples described above. The invention may be practiced other than as particularly described and still be within the scope of the accompanying claims.

### Example 13

[0600] An example sequence for a vector capable of rendering cells pluripotent and expressing a long Numb isoform, Oct-4, Sox-2, and EmGFP nucleic acid sequences under the control of tetracycline-sensitive promoters corresponds to (SEQ ID NO: 2).

[0601] A schematized map corresponding to the vector sequence above is shown in FIG. 3C.

[0602] The vector may be constructed fully through de novo gene synthesis, or in part through the cloning of the Numb, Sox and OCT3/4 cDNA sequences into the position occupied by LacZ in the Invitrogen pcDNA4tolacZ vector. Similarly, the tetR gene is found in the Invitrogen pcDNA6/TR vector. Coding sequences of genes referenced are also appropriate for cloning into the pcDNA4lacZ vector.

[0603] Alternatively, the tetR gene may be transfected into target cells separately utilizing the pcDNA6/TR vector in combination with a vector comprising the sequence here minus the tetR gene and its PCMV promoter.

[0604] Likewise, multiple vectors may be employed so long as elements similar to the elements included in the above sequence are present. This may reduce the likelihood of promoter competition. It is to be understood that other conditional promoter elements may be substituted for the tetracycline sensitive promoter elements.

[0605] Also depicted in FIG. 3A and FIG. 3B, are other lentiviral vectors expressing Oct4 and Sox2 or PRR+Numb. Integrase-deficient 2nd and 3rd generation lentiviral vectors may be utilized as non-integrating lentiviral vectors can be used as episomal vectors, in like manner to adenoviral (Lin et al., 2007), AAV, hybrid vectors, plasmid DNA, and other non-integrating vectors known to the art. Such integrase-deficient vectors can be readily introduced using a variety of standard transfection techniques (e.g. electroporation, chemically mediated transfection, fusogenic or non-fusogenic liposomes, lipofectamine, nanocapsules, nanovaults, etc.)—methods which allow high capacity integrase-deficient lentiviral vectors to be utilized without genomic integration and random alteration of the genome.

### Example 14

[0606] It is expected that intravenous and other administration of pluripotent stem cells produced according to the methods described herein (or other published methods) one or more times can provide replacement cells to the body and that such administration may serve to extend the life or improve the health of the patient suffering age-related senescence.

### Example 15. Production of Germ Cells

[0607] The current invention covers the derivation of germ cells from dividing multipotent, pluripotent, “VSEL-like” and/or “pluripotent-like” stem cells produced according to the methods described herein (or according to other published methods). The production of such germ cells may be suitable for treating infertility and producing embryos in vitro (e.g. Hubner et al., 2003; Kehler et al., 2005; Nayernia et al., 2006a; Nayernia et al., 2006b; Drusenheimer et al., 2007; Moore et al., 2007; etc.).

[0608] Likewise, the invention further covers transient or permanent transfection/contacting with other proteins and/or nucleic acid sequences, including ones selected from those encoding FIGLA, FIG alpha, DAZL, STRA8, FOXL2, OOGENESIN1, OOGENESIN2, OOGENESIN3, OOGENESIN4, SYCP2, SYCP3, SPO11, REC8, DMC1, MOS, STAG3, CCNB1, FOXO1, FOXO3, SOHLH1, SOHLH2, NOBOX, OBOX1, OBOX2, OBOX3, OBOX4, OBOX6, LHX8, LHX9, OOG1, SP1, ZFP38, TRF2, TB2/TRF3, TAF4B, TAF7L, TAF71, TIA1, PHTF1, TNP2, HILS1, DAZL, BMP15, PTTG3, AURKC, OTX2, SOX15, SOX30, FOXR1, ALF, OCT4, DPPA3/STELLA, ZFP38, RPS6KA3, HINFP, NPAT, SP1, SP3, HOXA1, HOXA7, HEX, YP30, ZP1, ZP2, ZP3, SFE1, SFE9, OPO, PLN, RDV, GLD1, MMU-MIR351, MMU-MIR615, MMU-MIR592, MMU-MiR882, MMU-MiR185, MMU-MiR491, MMU-MiR326, MMU-MIR330, MMU-MIR351.

[0609] Likewise, the invention further covers transfection/contacting with other proteins and/or nucleic acid sequences, including ones selected from those encoding SYCP2, SYCP3, SPO11, REC8, DMC1, MOS, STAG3, OCT4, ALF, RPS6KA3, HINFP, SP1, SP3, TAF71, TIA1, PHTF1, TNP2, HILS1, CLGN, TEKT1, FSCN3, DNAHC8, LDHC, ADAM3, OAZ3, AKAP3, MMU-MIR351, MMU-MIR615, MMU-MIR592, MMU-MIR882, and MMU-MIR185.

[0610] Likewise, the invention further covers transfection/contacting with other proteins and/or nucleic acid sequences, including ones selected from those encoding MOS, CCNB1, OCT4, FIG alpha, FIGL alpha, ALF, SOHLH1, SOHLH2, LHX8, LHX9, OOG1, FIG alpha, SP1, LHX3, LHX9, TBP2/TRF3, DAZL, BMP15, GDF9, PTTG3, AURKC, OTX2, SOX15, SOX30, FOXR1, NOBOX, OBOX1, OBOX2, OBOX3, OBOX6, OOGENESIN1, OOGENESIN2, OOGENESIN3, OOGENESIN4, YP30, ZP1, ZP2, ZP3, SFE1, SFE9, OPO, PLN RDV, GLD1, DAZL, STRA8, MMU-MiR615, MMU-MIR491, MMU-MiR326, MMU-MIR330, MIR212 and MMU-MIR351.

### Example 16: Generation of Transgenic Animals

[0611] The present invention covers the generation of transgenic animals. As with other pluripotent cells, the pluripotent or pluripotent-like cells produced according to the methods described herein (or other published methods) may be utilized to produce transgenic animals by any method known to the art.

### Example 17: Therapeutic Vector Construction

[0612] Examples of retroviral vectors which may be employed include, but are not limited to, those derived from Moloney Murine Leukemia Virus, Moloney Murine Sarcoma Virus, and Rous Sarcoma Virus, FIV, and HIV. Appropriate expression vectors are that may be employed for transfecting DNA or RNA into eukaryotic cells. Such vectors include, but are not limited to, prokaryotic vectors such as, for example, bacterial vectors; eukaryotic vectors, such as, for example, yeast vectors and fungal vectors; and viral vectors, such as, but not limited to, lentiviral vectors, adenoviral (Lin et al., 2007) vectors, adeno-associated viral vectors, and retroviral vectors.

[0613] The replication incompetent pcDNA 6.2 GW/miR and pcDNA 6.2/EmGFP-Bsd/V5-DEST vectors are examples of an appropriate expression vectors (Invitrogen) and allow expression of synthetic oligonucleotides (e.g. miRNAs) that have the capacity to cleave targeted sequences (or their corresponding proteins). These vectors include flanking and loop sequences from endogenous miRNA to direct the excision of the engineered miRNA from a longer Pol II transcript (pre-miRNA).

[0614] Alternatively, inclusion of the HIV psi sequence allows the therapeutic vector to compete with native HIV genome for packaging into viral particles, also inhibiting HIV transmission.

[0615] Combining multiple miRNA sequences directed against a single target increases the likelihood of success in reducing target sequence expression. miRNA sequences may be operably linked to tissue specific promoters such as the EF-1 alpha promoter, any T cell specific promoter, or macrophage specific promoter to ensure expression in the desired cell types.

[0616] Utilizing Invitrogen's lentiviral destination (DEST) vectors for gene expression, the resulting therapeutic vector(s) becomes capable of stably transducing both dividing and non-dividing cell types.

[0617] In a preferred embodiment, the therapeutic vector(s) contains multiple synthetic oligonucleotide sequences driven by one or more promoters so as to reduce expression of CXCR4, CCR5, and/or any other cellular protein known to act as a co-receptor for HIV infection in target cells.

[0618] In one therapeutic vector (constructed in 2006), four miRNA sequences targeting CXCR4 and CCR5 co-receptors were cloned into the pcDNA 6.2 GW/miR vector along with decoy RNA sequences targeting HIV-2 TAR and RRE.

[0619] Genetic constructs may include a vector backbone, and a transactivator which regulates a promoter operably linked to heterologous nucleic acid sequences (or their corresponding proteins).

[0620] Another example of a suitable vector is a retroviral vector. Retroviruses are RNA viruses which contain an RNA genome. The gag, pol, and env genes are flanked by long terminal repeat (LTR) sequences (or their corresponding proteins). The 5′ and 3′ LTR sequences promote transcription and polyadenylation of mRNAs.

[0621] The retroviral vector may provide a regulable transactivating element, an internal ribosome reentry site (IRES), a selection marker, and a target heterologous gene operated by a regulable promoter.

[0622] Alternatively, multiple sequences may be expressed under the control of multiple promoters. Finally, the retroviral vector may contain cis-acting sequences necessary for reverse transcription and integration. Upon infection, the RNA is reverse transcribed to DNA which integrates efficiently into the host genome. The recombinant retrovirus of this invention is genetically modified in such a way that some of the retroviral, infectious genes of the native virus are removed and in embodiments replaced instead with a target nucleic acid sequence for genetic modification of the cell. The sequences may be exogenous DNA or RNA, in its natural or altered form.

### Example 18: Example Methods for Generation of the Therapeutic Vector

[0623] The methods for generation of the therapeutic vector(s) include those taught in Invitrogen's Viral Power Lentiviral Expression Systems Manual (incorporated by reference herein). Briefly, the EmGFP-bsd cassette is cloned as a PmlI-BlpI fragment into the pLenti6/R4R2/V5-DEST vector, while the miR-decoy cassette is simultaneously transferred by BP reaction into pDONR221.

[0624] Then the EF1a promoter and miR-decoy are Multi-site LR crossed into the modified pLenti6/EmGFP-bsd/R4R2-DESTvector.

[0625] pLenti6/R4R2/V5-DEST vector sequence (SEQ ID NO: 1), Example miR-decoy cassette sequence (SEQ ID NO: 3).

### Example 19: Methods for Propagating/Proliferating Stem/Progenitor Cells In Vivo

[0626] In order to obtain large numbers of target cells that are relatively resistant to 1) HIV infection and/or 2) HIV replication and/or 3) HIV transcription, progenitor/stem cells can be grown in Dulbecco's modified Minimal Essential Medium (DMEM) supplemented with glutamine, beta.-mercaptoethanol, 10% (by volume) horse serum, and human recombinant Leukemia Inhibitory Factor (LIF). The LIF replaces the need for maintaining progenitor/stem cells on feeder layers of cells, (which may also be employed) and is essential for maintaining progenitor/stem cells in an undifferentiated state.

### Example 20

[0627] Cells are collected from individuals, developmentally-activated, transfected with the therapeutic vectors, then cultured and prepared for autologous or heterologous transplantation by standard methods, with or without HLA typing and matching.

### Example 21

[0628] Umbilical cord blood samples are obtained from umbilical blood cord bank. The cells are then (with or without developmental activation) transfected with the therapeutic vector of beneficial sequences (or their corresponding proteins), then prepared for transplantation by standard methods, with or without HLA typing and matching.

### Example 22: Examples of Synthetic Oligonucleotide Sequences Suitable for Inclusion in the Therapeutic Vector

[0629] Any synthetic oligonucleotide sequences that successfully reduce the protein expression of targeted sequences >70% is covered by the present invention. See FIG. 17D.

[0630] Any synthetic oligonucleotide sequences that successfully reduce the ability of target cells to sustain HIV replication by >70% or to a lesser but therapeutic degree or HIV viral activity by >70% or to a lesser but therapeutic degree are also covered by this invention.

[0631] Examples of miRNA sequences include miRNA sequences derived by IVGN algorithm (Invitrogen). miRNA sequences targeting the CXCR4 gene include top strand:

(SEQ ID NO. 4)
5'-TGCTGATACCAGGCAGGATAAGGCCAGTTTTGGCCACTGACTGAC
TGGCCTTACTGC CTGGTAT -3' and bottom strand:
(SEQ ID NO: 5)
5-CCTGATACCAGGCAGTAAGGCCAGTCAGTCAGTGGCCAAAACTGGC
CTTATCCTGCC TGGTATC -3'; as well as top strand:
(SEQ ID NO: 6)
5'-TGCTGTGACCAGGATGACCAATCCATGTTTTGGCCACTGACTGACATG
GATTGCATC CTGGTCA -3' and bottom strand:
(SEQ ID NO: 7)
5'-CCTGTGACCAGGATGCAATCCATGTCAGTCAGTGGCCAAAACATGGAT
TGGTCATCC TGGTCAC -3'.

[0632] Similarly, miRNA sequences targeting the CCR5 gene include top strand:

(SEQ ID NO: 8)
5'-TGCTGATCGGGTGTAAACTGAGCTTGGTTTTGGCCACTGACT
GACCAAGCTCATTACACCCGAT-3' and bottom strand:
(SEQ ID NO: 9)
5'-CCTGATCGGGTGTAATGAGCTTGGTCAGTCAGTGGCCAAAAC
CAAGCTCAGTTTACA CCCGATC-3' as well as top strand
(SEQ ID NO: 10)
5'-TGCTGATAGCTTGGTCCAACCTGTTAGTTTTGGCCACTGACT
GACTAACAGGTGACCAAGCTAT-3' and bottom strand:
(SEQ ID NO: 11)
5'-CCTGATAGCTTGGTCACCTGTTAGTCAGTCAGTGGCCAAAAC
TAACAGGTTGGACCA AGCTATC -3'

### Example 23: Examples of Decoy RNA Suitable for Inclusion in the Therapeutic Vector

[0633] Any decoy sequences that successfully reduce the ability of target cells to sustain HIV replication by >70% or to a lesser but therapeutic degree or HIV viral activity by >70% or to a lesser but therapeutic degree are covered by this invention.

(SEQ ID NO: 12)
An example TAR decoy sequence is
gtcgctctgcggagaggctggcagattgagccctgggaggttctctcc
agcactagcaggtagagcctgggtgttccctgctagactctcaccagt
gcttggccggcactgggcagacggctccacgcttgcttgcttaaagac
ctcttaataaagctgc(Browning et al., 1999).
See FIG. 17D.
(SEQ ID NO: 13)
An example RRE decoy sequence is
tgctagggttcttgggttttctcgcaacagcaggttctgcaatgggcg
cggcgtccctgaccgtgtcggctcagtcccggactttactggccggga
tagtgcagcaacagcaacagctgttggacgtggtcaagagacaacaag
aactgttgcgactgaccgtctggggaacgaaaaacctccaggcaagag
tcactgctatagagaagtacctacaggaccaggcgcggctaaattcat
ggggatg (Dillon et al., 1990). See FIG. 17D.

### Example 24: Flanking Sequences Providing Stability for RNA Decoys

[0634] Examples of appropriate flanking sequences for RNA decoys are as follows:

TAR DECOY SEQ
(SEQ ID NO: 14)
GUGCUCGCUUCGGCAGCACGTCGAC
(SEQ ID NO: 15)
UCUAGAGCGGACUUCGGUCCGCUUUU
RRE DECOY SEQ
(SEQ ID NO: 16)
GUGCUCGCUUCGGCAGCACGTCGAC
(SEQ ID NO: 17)
UCUAGAGCGGACUUCGGUCCGCUUUU.
See FIG. 17D.

[0635] Previously, it was demonstrated that decoy sequences flanked by hairpins on either side, 19 nucleotides (ntds) of the U6 RNA on the 5′ side as well as a 3′ stem immediately preceding a poly U terminator for POLIII, showed greater stability. This arrangement is expected to protect against 3′-5′ exonuclease attack, and to reduce the chances of the 3′ trailer interfering with the insert RNA folding. Since only the first 3/4 of the tRNA sequence is present, the 5′ end of the insert should be protected and export from the nucleus should be prevented (Good et al., 1997).

### Example 25: Introduction of Therapeutic Vector to the Host

[0636] In a preferred embodiment, blood stem/progenitor cells, and target cells are transfected with the therapeutic vector(s) (or associated therapeutic virus) in vivo by introduction of the therapeutic vector(s) into the host blood, tissues, or bone marrow, etc. The greatest benefit may be achieved by modifying a large number of endogenous target and stem/progenitor cells. This may be accomplished by using an appropriately-sized, catheter-like device, or needle to inject the therapeutic vector(s) into the venous or arterial circulation. In a preferred embodiment, the virus is pseudotyped with VSV-G envelope glycoprotein and native HIV-1 env proteins.

### Example 26: Introduction of Genetically-Modified Cells into the Host

[0637] Blood cells, such as mature peripheral blood T lymphocytes, monocytes, macrophages, T cell progenitors, macrophage-monocyte progenitor cells, and/or pluripotent hematopoietic stem cells (such as those found in umbilical cord blood and occupying bone marrow spaces) as well as other stem/progenitor cells can be transfected using the therapeutic vector(s) in vitro.

[0638] Appropriate concentrations of the therapeutic vector(s) may be those consistent with Browning et al., 1999. Subsequently, cells are expanded (propagated) in vitro, and are then transferred to the host via introduction of the cells to the venous or arterial circulation using an intravenous needle or catheter. Subsequently, cells transfected with the therapeutic vectors are able to “home” to the bone marrow and other tissues.

[0639] It is understood that the examples and embodiments described herein are for illustrative purposes only and that various modifications or changes in light thereof will be suggested to persons skilled in the art and are to be included within the spirit and purview of this application and scope of the appended claims. All publications, patents, and patent applications cited herein are hereby incorporated by reference in their entirety for all purposes.

### Example 27: Fluorescein-Conjugated Albumin Protein is Delivered in High Concentration to the Interior of 3T3 Cells with High Efficiency Using Protein Electroporation, According to the Method of Koken et al., 1994

### Protein Electroporation

[0640] 3T3 cells electroporated at 300V with a varying number of 5 ms pulses showed progressively increased protein uptake (see FIGS. 4A-4D). ˜200,000 3T3 cells were electroporated in a 4 mm cuvette in the presence of FITC-conjugated albumin (150 ug/200 ul). Visual inspection and photography using a fluorescent microscope revealed progressively increased FITC-albumin uptake and fluorescence over a wide range of pulse number (10-200 pulses). FIGS. 4A-4D depict the cells (at low power magnification, 10×) 48 hours after exposure to 20 pulse (FIG. 4A), 50 pulse (FIG. 4B), 100 pulse (FIG. 4C) and 200 pulse (FIG. 4D) electroporation, demonstrating protein uptake was a function of electroporation.

### Example 28: Long PRR+Numb Alone, or in Combination with Oct4, Sox2, Nanog and/or Notch Proteins, Activated/Reprogrammed the Cells Such that they were Shown to be Newly-Positive for SSEA3, SSEA4, and Tra-1-81 Antigens, Indicative of Pluripotent Stem Cells, as Well as Endogenous Oct4, Sox2, Nanog and PRR+Numb Proteins

### Cell Culture

[0641] Prior to electroporation, 3T3 cells and 3T3-PRR+Numb cells were maintained in growth medium (GM) containing DMEM supplemented with 10% fetal bovine serum (FBS), 20 mM L-glutamine, and 1% penicillin/streptomycin.

### Protein Electroporation

[0642] 3T3 cells and 3T3-PRR+Numb cells were harvested and electroporated using the BTX ECM 830 electroporation machine according to the methods of Koken et al., 1994. Briefly, ˜200,000 cells were transferred to 4 mm cuvettes and electroporated in the presence of either 50 ug Notch protein or 150 ug of oct4/sox2/nanog protein cocktail. Immediately following electroporation, the cells were transferred to Dulbecco's Modified Eagle Medium (DMEM) in standard cell culture plates with or without 20 ng/ml EGF, and incubated at 37 degrees Celsius.

### Immunohistochemistry

[0643] In all of these experimental conditions, long PRR+Numb alone or in combination with Oct4, Sox2, Nanog and/or Notch proteins activated/reprogrammed the cells such that they were shown to be newly-positive for SSEA3, SSEA4, and Tra-1-81 antigens, indicative of pluripotent stem cells, as well as endogenous Oct4, Sox2, Nanog and PRR+Numb proteins. See FIGS. 5A-5D and 6A-6D.

### Example 29: Non-Pluripotent Murine Cells Electroporated with Oct4, Sox2, Nanog and Notch-1 Proteins (300V, 70 Pulses, 50 Ug Per Protein), or Overexpressing the Long PRR+Numb Isoform, Cluster Hierarchically and in Principal Component Analysis (PCA) Plots Amongst Published, Pluripotent ES and iPS Cells

### Cell Culture

[0644] Prior to electroporation, 3T3 cells and 3T3-PRR+Numb cells were maintained in growth medium (GM) containing DMEM supplemented with 10% fetal bovine serum (FBS), 20 mM L-glutamine, and 1% penicillin/streptomycin.

### Protein Electroporation

[0645] 3T3 cells and 3T3-PRR+Numb cells were harvested and electroporated using the BTX ECM 830 electroporation apparatus according to the methods of Koken et al., 1994. Briefly, 200,000-1M cells were transferred to 4 mm cuvettes and electroporated in the presence of 200 ug/ml oct4/sox2/nanog/notch protein cocktail. Immediately following electroporation, the cells were a) returned to growth medium at 37 degrees.

[0646] Resulting embryoid bodies, floating colonies and cells adherent 4 days post-electroporation were collected and their RNA extracted for gene array analysis using the Affymetrix GeneChip HTA 2.0 chip. Murine Cells electroporated with Oct4, Sox2, Nanog and Notch-1 proteins (300V, 70 pulses, 50 ug per protein), or overexpressing the long PRR+Numb isoform, clustered hierarchically in Heatmaps (FIG. 7A) and in Principal Component Analysis (PCA) plots (FIG. 7B) amongst published, pluripotent ES and iPS cells (GSE53299 and GSE61403).

[0647] Reactome analysis (https://reactome.org/PathwayBrowser) was further performed based on the results of the gene array analysis and revealed that treated cells showed enriched or overexpressed genes in, for example the Cell Cycle pathways and Developmental pathways (including the Transcriptional regulation of pluripotent stem cells sub-pathway).

[0648] Example 30: After electroporation with Oct4, Sox2, and Nanog proteins, human buccal check cells are induced to pluripotent-like, Developmentally-Activated Cells: They Divide, Form Colonies, Form Embryoid composed of VSEL cells, and Express Oct4, Sox2, and Nanog Proteins. ˜200,000 human buccal check cells were electroporated in a 4 mm cuvette with 300V in the presence of FITC-conjugated albumin (150 ug/200 ul). Approximately 200,000 human buccal check cells were electroporated in a 4 mm cuvette in the presence of FITC-conjugated albumin (150 ug/200 ul). Increasing number of pulses led to progressively increased FITC-albumin uptake and fluorescence. See FIGS. 8A, 8B. Increasing number of pulses led to progressively increased FITC-albumin uptake and fluorescence. Photomicrographs show a small colony (FIG. 9A) and a much larger colony of proliferating epithelioid cells (FIG. 9B) induced 6 days after electroporation in the presence of 150 ug Oct4, Sox2 and Nanog protein. By 46 days post-electroporation with Oct4, Sox2, and Nanog proteins, colonies visible at low power (10×) mostly comprised darker appearing embryoid (asterisk) composed of VSEL-like cells (FIG. 9C).

[0649] Immunohistochemistry showed electroporated check cells expressed Oct4 (FIG. 10A), Nanog (FIG. 10B), and Sox2 (FIG. 10C). Dense, darkly stained embryoid was composed of VSEL-like cells (*) are apparent on FIG. 10B.

[0650] Example 31: Protein Electroporation “flips the Switch”. After electroporation in PBS with 50 ug, each, of Oct4, Sox2, and Nanog proteins, human buccal cheek cells are induced to pluripotent-like, Developmentally-Activated Cells (DAdC). 14 days post-electroporation, erstwhile epithelial, buccal check cells show altered morphologies, divide, form colonies, form embryoid composed of VSEL cells, and express Oct4, Sox2, and Nanog Proteins. (FIGS. 11A-11I). Embryoid positively-stained after immunohistochemistry using antibodies against Nanog, Sox2 and Oct4, well-known markers of pluripotency. The embryoid was formed by buccal cheek cells following electroporation with Oct4 (FIG. 12C), Sox2 (FIG. 12B) and Nanog (FIG. 12A) proteins in PBS (300V, 70 pulses), and consists of VSEL-like cells (Ratajczak, et al., 2008; Kuruca, et al., 2019).

### Example 32

[0651] Human hepatocyte cells transduced with lentivirally-encoded i. PRR+Numb, ii. Oct4/Sox2, or iii. PRR+Numb, Oct4, and Sox2, cluster hierarchically and in Principal Component Analysis (PCA) plots with published pluripotent ES and IPS cells. Human hepatic cells were transduced with pLenti-SFFV-Oct4-2A-Sox2 lentivirus (108 cfu/ml), with doxycycline inducible, pReceiver-Lv 113-PRR+Numb lentivirus, or with both lentiviruses. 4 days and 11 days after transduction with PRR+Numb, and 1 week after transduction with Oct4/Sox2, the cells were collected, their RNA extracted and analyzed using qt-PCR and gene array (using the Human Genome U133 Plus 2.0 Array). Human hepatic cells that were electroporated with Oct4, Sox2, Nanog and Notch-1 proteins (300V, 70 pulses, 50 ug per protein), or overexpressing the long PRR+Numb isoform, clustered hierarchically in Heatmaps (FIG. 13A) and in Principal Component Analysis (PCA) plots (FIG. 13B) amongst published, pluripotent ES and iPS cells (GSE76830 and GSE88963).

[0652] Reactome analysis (https://reactome.org/PathwayBrowser) was further performed based on the results of the gene array analysis and revealed that treated cells showed enriched or overexpressed genes in, for example the Cell Cycle pathways and Developmental pathways (including the Transcriptional regulation of pluripotent stem cells sub-pathway).

### Example 33

[0653] Protein electroporation according to the Method of Koken et al., 1994 (300V) provides delivery of protein at high concentrations to the interior of 3T3 cells for rapid (24-72 hr), efficient (100%) and durable (>60 days), cell reprogramming. Seventy, 300V pulses were delivered for 5 ms at 100 ms intervals. (FIGS. 14A-14D, FIGS. 15A-15D, FIGS. 16A-16D).

[0654] Less than 24 hours after protein electroporation with Oct4, Sox2, and Nanog proteins, approximately three percent of cells showed pluripotency induction (GFP reporter expression under the control of the c-MYC promoter). FIGS. 14A, 14B show corresponding 40× brightfield and Fluorescence images. In contrast, 72 hours after protein electroporation (FIGS. 14C, 14D), >95% cells show pluripotency induction (c-MYC/GFP stem reporter expression (ABM)). Thirty days after Oct4/Sox2/Nanog Protein Electroporation of 3T3 Cells, the resulting Embryoid bodies showed positive reactivity with anti-Oct4 (FIG. 15A), anti-Nanog (FIG. 15B), anti-Numb (FIG. 15C) and anti-Notch (FIG. 15D) antibodies.

[0655] After electroporation with Oct4, Sox2 and Nanog proteins (50 ug each) in PBS with seventy 5 ms pulses at 300V, 100% of mouse 3T3 cells were activated to adopted rounded, stem cell morphologies and form small colonies by day six (FIG. 16A), large embryoid bodies on day 40 (FIG. 16B and FIG. 16C), and large rafts of embryoid by day 57 (FIG. 16D).

### Example 34: Construction of the pLenti6-MSGW/EmGFP-Bsd/EF1a/miR-Decoy HIV Gene Therapy Vector

[0656] Subcloning of the EmGFP-Bsd cassette from pcDNA™ 6.2/EmGFP-Bsd/V5-GW/CAT into the final vector was confirmed by Restriction Digestion (FIG. 17A). The pLenti6-MSGW/EmGFP-Bsd/EF1a/miR-decoy vector comprises HIV RRE and TAR decoy sequences, miRNA sequences directed against HIV co-receptors, CCR5 and CXCR4 and the HIV-2 psi sequence, all of which confer resistance to various human and animal immunodeficiency viruses. Virus stock was prepared from transfected 293FT cells. Successful transfection was confirmed by visualizing syncitia formation at 72 hours (FIG. 17B) versus control (FIG. 17C).

### Example 35

[0657] Combination of Long PRR+Numb transfection with Notch and/or Oct4/Sox2/Nanog Protein electroporation (per Koken et al., 1994, 300V, 70 pulses, 5 ms pulse length, 100 ms pulse interval) produces the claimed effect (FIGS. 18A-18F, 19).

### Protein Electroporation

[0658] Equal numbers (˜200,000) of 3T3 cells and 3T3-PRR+Numb overexpressing cells were electroporated only with: i) Notch protein; ii) Oct4, Sox2, and Nanog proteins; or iii) Notch, Oct4, Sox2, and Nanog proteins. On day thirty (30), non-adherent and floating, reprogrammed cell colonies were collected and resuspended in equal volumes of medium for low power (10×) visual comparison of cell reprogramming efficiencies: Control (FIG. 18A), Numb (FIG. 18B), Numb/Oct4/Sox2/Nanog (FIG. 18C), Numb/Notch (FIG. 18D), as well as, Numb/Notch/Oct4/Sox2/Nanog (FIG. 18E), and Notch/Oct4/Sox2/Nanog (FIG. 18F). In all of the experimental conditions, Oct4, Sox2, Nanog and/or Notch proteins (alone or in combination with transfected PRR+Numb) reprogrammed the cells such that they were shown to be newly-positive for SSEA3, SSEA4, and Tra-1-81 antigens, indicative of pluripotent stem cells, as well as endogenous Oct4, Sox2, Nanog and PRR+Numb proteins.

[0659] FIG. 19 illustrates an embryoid bodies 35 days post electroporation. A single round of electroporation according to the method of Koken et al. (1994), in the presence of Oct4, Sox2, Nanog, and Notch proteins (50 ug each) (Abcam), consistently reprogrammed cells with high efficiency (˜100% in some experiments) to form colonies, embryoid, and VSEL-like cells, consistent with pluripotency or a “pluripotent-like” state.

### Example 36

[0660] A catheter style electroporation apparatus suitable for in vivo electroporation with protein and other transfectants consisting of a needle through which a protein, nucleic acid, drug or other transfectant may be administered to a tissue (FIG. 2A).

[0661] This apparatus may include some variants of catheter 7 (FIG. 2B and FIG. 2C). FIG. 2A shows the variant of catheter style electroporation apparatus with variant of catheter 7 with needle 9 and two electrodes 8 (see FIG. 2B). FIG. 2D illustrates a loop or circular electrode 8 array which is used in catheter 7 (showed on FIG. 2C) suitable for in vivo electroporation.

[0662] The needle 9 is i) situated between two electrode 8 prongs (which may be either sharp or dull) as shown in FIG. 2B, or the needle is ii) accompanied by a single internal electrode 8 (FIG. 2C) that is used in conjunction with an external electrode (as commonly occurs with cardiac ablation), or the needle doubles as a first electrode iiia. and a second electrode is located alongside it, or iiib. a second electrode is located externally, or iiic. a second electrode is connected to a separate accompanying catheter. The separate accompanying catheter may also comprise a needle for delivering transfectant that doubles as a second electrode. The setup overall is akin to the setup uses for cardiac ablation, except that voltage is applied locally for cellular permeabilization and uptake of the transfectant.

[0663] FIG. 1E illustrates an assembly of sample cell culture dishes (number of dishes may vary for example from 1 to 1,600) wherein each has a “reservoir” 3 portion that functions like a typical electroporation cuvette and broader portion (“inspection plane”) 5 which functions like a traditional cell culture plate. An assembly may feature one or more plate covers. The dimensions (including width) of the reservoir 3 may vary and approximate the dimensions and materials of traditional electroporation cuvettes allowing for example, for 1 mm, 2 mm, 4 mm, 6 mm gaps, etc. In some embodiments, the electrode contact 6 is visible along the side of the reservoir 3. “w” indicates width of reservoir 3 of dish.

[0664] The reservoirs 3 and inspection planes 5 may take various shapes (FIGS. 1A-1D) and be positioned centrically or eccentrically relative to one another. FIGS. 1A, 1C and 1D show additional “feet” 4 along the edge of the plates that may or may not be detachable, so that the dishes will be able to stand on a flat surface. FIG. 1B shows “skirt” 4 along the edge of the plates that may or may not be detachable, so that the dishes will be able to stand on a flat surface. The various dishes may feature detachable base/stand with foot processes or skirts to provide stability. Alternatively, the dish may be manufactured with base/stand incorporated with the dish as a single piece. FIGS. 1C, 1D 1E show electrode contact 6 for electroporation.

[0665] Electroporation will typically occur in the reservoir 3. Additional media may be added before or after electroporation allowing cells to be incubated in larger volumes of media than are accommodated by the reservoir alone.

[0666] The volume of media contained in the reservoir portion is designated 1. The volume of media contained in cell culture dish overall is designated 2.

[0667] FIGS. 1F, 1G, 1I illustrate “Dish-in-Dish”, cell culture flask with electroporation reservoir in which 3—reservoir, 10—plastic flask, 11—cap, 12—exposition/visualization plane, 14—electrode plates, w—gap width, 13—funnel. FIG. 1H illustrates “Dish-in-Dish”, cell culture flask with multiple electroporation reservoirs in which 10—plastic flask, 11—cap, 12—exposition/visualization plane, 3—reservoir, 14—electrode plates, w—gap width, 13—funnel. FIG. 1J illustrates “Dish-in-Dish”, cell culture dish with electroporation reservoir in which 15—dish, 12—Exposition/Visualization plane, 3—reservoir, 14—electrode plates, w—gap width.

### Example 37. Structural Comparison Between Mouse Numblike and its Mammalian Numb Homologues and Construction of Integrase-Deficient, Transgene Expressing Lentivectors

[0668] FIG. 20A illustrates that Numblike shows greater than 70% sequence identity in its amino terminal half to the shortest Numb homologue, but less than 50% identity in its cytoplasmic half where a unique 15 amino acid polyglutamine domain (purple) is found. The longest Numb isoform contains an 11 amino acid insert (white) within its phosphotyrosine binding (PTB) domain (black), as well as a 49 amino acid insert (gray) adjacent to a proline rich region (PRR). Two intermediate sized isoforms contain either the PTB or PRR inserts, but not both. The shortest Numb isoform lacks both inserts. FIG. 20B illustrates the HIV-EGFP Numblike and HIV-EGFP-NumbPTB+/PRR+vectors constructed from the two-gene HIV-EGFP-HSA vector (Reiser et al., 2000) by cloning the transgene cDNAs into nef coding region previously occupied by the mouse HSA cDNA. Abbreviations: Rev-response element (RRE), slice donor site (SD), splice acceptor site (SA).

### Example 38. In Vivo Injection of the HIV-EGFP-Numblike Transfectant into the Lateral Ventricle and Subsequent Electroporation Per Saito et al., (2001)

[0669] a) 72 hours after transient transfection, pairs and clusters of EGFP-positive cells were detected migrating radially in the mouse forebrain. FIG. 21A illustrates high power photograph depicting a cluster of EGFP-positive cells migrating ventrolaterally, away from the third ventricle within the developing thalamus. One cell from this cluster (FIG. 21B) displays many of the classic features associated with newly-generated, migrating neurons including bipolar morphology and a leading process with apparent pseudopodia. FIG. 21C illustrates low power image depicting a pair of EGFP-positive cells which appear to be exiting the intermediate zone (iz) and entering the cortical plate (cp). DAPI stained nuclei are depicted in blue. These highly similar cells expressed EGFP (green) in their cell bodies as well as their pial directed, leading processes (arrowheads) (FIG. 21D). This pair also expressed HuC/D (red), a marker of newly generated, migrating and immature neurons, in their cell bodies and processes (FIG. 21E). Higher magnification of inset depicted on FIG. 21C is shown on FIG. 21F (Scale bar=10 um).
[0670] b) FIG. 22A depicts a 3D reconstruction of the E18 cortical plate derived from high power z series images. Numerous EGFP-positive cells (green) demonstrate morphologies and location consistent with differentiating neurons. FIGS. 22B and 22C show higher magnifications of insets illustrated on FIG. 22A. These cells were identified as neurons according to their co-expression of the neuronal class III beta-tubulin (red). DAPI stained nuclei are shown in blue. A similar 3D reconstruction is shown on FIG. 22D. Higher magnification of insets illustrated on FIG. 22D is shown on FIG. 22E and FIG. 22F. (Scale bar=50 um).

### Example 39. In Vivo Injection Followed by Electroporation of Mouse Ventricular Zone Cells at P0 with HIV-EGFP Numblike Versus HIV-EGFP Control Vector

[0671] Upper left corner of FIG. 23A shows a low power image of the hypothalamic third ventricle (Hy 3V) rotated so that the electroporated portion of the ventricular neuroepithelium is upwards, and the superior portion of the ventricle is to the right. Radially-oriented, EGFP-positive cells (radial glia transfected with control) are seen lining the ventricle and represent the majority of cells labeled by control (˜80%). Their long EGFP-positive processes are observed to extend to the pia within the plane of section. A smaller proportion of cells were located at or near the pial margin-always closely associated with labeled radial processes. Middle section of FIG. 23A depicts cells transfected with HIV-EGFP-Numblike at P0. Forty-eight hours later, virtually all of the cells have migrated away from the ventricle consistent with their new identity as differentiating neurons. Many of the cells dispersing away from the ventricle showed morphologies and trajectories consistent with the classical appearance of radially migrating neurons. Lower right corner of FIG. 23A shows a higher magnification of the inset from middle section of FIG. 23A and depicts an EGFP-positive cell with features characteristic of migrating neurons, including bipolar morphology, a thick leading process with pseudopodia, and a thin lagging process.

[0672] Abbreviations: Th3V=thalamic portion of the third ventricle. FIG. 23B shows a 3D reconstruction derived from 180 high power, z-series images of the thalamic third ventricle. P2 germinal zone cells, including those transfected with control vector and displaying radial glial morphology, consistently expressed GLAST (glial glutamate transporter) in their cell membranes. FIG. 23C shows the radial glial cell depicted in the inset illustrated on FIG. 23B at higher magnification (scale Bars=50 um on FIG. 23B and 100 um on middle section of FIG. 23A).

### Example 40. Intraventricular Injection of the HIV-EGFP-Numblike Transfectant Followed by In Vivo Electroporation Upregulates Numb Expression

[0673] FIG. 24A illustrates a 3D reconstruction depicting a section 50 um. EGFP labeled cells, both within and beyond the germinal zone, showed increased Numb immunoreactivity (red) relative to non-transfected cells in the same section (FIG. 24B). A portion of the germinal zone is shown at higher magnification in lower right corner on FIGS. 24A, 24B. The insets again show a relatively disorganized ventricular zone following transfection. This disorganization may have been related to the emigration of cells previously lining the ventricle, but might also reflect tissue injury due to electroporation alone (scale bar=100 um on FIGS. 24A, 24B and 100 um in lower right corner on FIGS. 24A, 24B.

### Example 41

[0674] In vivo injection of the HIV-EGFP-NumbPTB-/PRR-transfectant followed by electroporation promotes neuronal differentiation in postnatal mice. FIG. 25A depicts a coronal section through dorsal neocortex in a P3 mouse transfected with the HIV-EGFP-NumbPTB-/PRR-forty-eight hours earlier. Dapi-stained nuclei in the region of electroporation indicated large numbers of cells (arrows) migrating radially through the various layers of the cerebral cortex including the subventricular zone (SVZ), corpus callosum (CC), subplate (SP), and cortical plate (CP). FIG. 25B illustrates EGFP expressing cells (triangles) also appeared to migrate laterally in the intermediate zone (IZ) as is known to occur during normal development. Most EGFP-positive cells also expressed high levels of Hu C/D, indicating they were newly-generated neurons (not shown). A 3D reconstruction from confocal z-series images shows HIV-EGFP-NumbPTB-/PRR-transfected cells in the P3 thalamus (FIG. 25C). Most of the cells are located outside the germinal zone 48 hours later and can be recognized as migrating neurons by their morphologies and increased expression of Hu C/D—having been induced to begin differentiating simultaneously following clectroporation and to migrate as a cohort. Other cells nearer the ventricle show migratory profiles and appear to be exiting the VZ, but have not yet begun to express Hu C/D (arrowheads). Scale bar=100 um on FIG. 25A and 40 um on FIG. 25C.

### Example 42. Transiently Expressed EGFP Strongly Correlates with Markers of Neuronal Differentiation in Cells Transfected with Numblike Following In Vivo Injection

[0675] All EGFP positive cells were analyzed immunohistochemically. A discrete cluster of EGFP-positive cells located in the thalamus, 600-700 microns dorsolateral to the germinal zone is depicted. Consecutive sections containing cells from this cluster were stained for markers of neural differentiation including GLAST (FIG. 26A), Numb (FIG. 26B), TUJ (FIG. 26E), and DCX (FIG. 26F). Subsequent pixel-by-pixel analysis of these images demonstrated strong correlation between EGFP intensity (green) and markers of neuronal differentiation (red) (R-squared values >0.76). On the other hand, EGFP expression was not correlated with expression of the immature marker, GLAST (FIG. 26C: R-squared value=0.1079). DCX (FIG. 26H) showed the highest correlation (R-squared value=0.909), while Numb reactivity was also strongly correlated with EGFP expression in Numblike transfected cells (FIG. 26D: R-squared value=0.76). Brains of animals injected with transfectants and electroporated in vivo at P0 were sectioned to completion and inspected microscopically. While large clusters of neurons transfected at P0 with Numb or Numblike were detected within each of the brains, having migrated and differentiated as a cohort, they no longer expressed EGFP-evidence that the integrase deficient lentivectors remained episomal (did not integrate) and produced only transient transfection.

### Example 43. HIV-EGFP-Numb^{PRR}-/^{PTB}- and HIV-EGFP-Numblike Lentiviruses Reduce Proliferation and Promote Differentiation in Ras+, Breast Cancer Cells

[0676] At 5 days post-transduction/post-plating, Ras+ cancer cells transduced with control HIV-EGFP lentivirus showed rapid proliferation and chaotic morphologies (FIG. 27A). The inset shows three round, brightly fluorescing cells whose appearance was consistent with cancer stem cells.

[0677] In contrast, cells transduced with HIV-EGFP-Numb^{PRR}-/^{PTB}-showed evidence of symmetrical terminal divisions (cell pairs) on day 5, as well as reduced proliferation (FIG. 27B). In addition to blocking proliferation, transduction with HIV-EGFP-Numblike induced Ras+ cancer cells to adopt a phenotype consistent with normal breast epithelial cells (FIG. 27C). At 10 days post-plating/post-transduction, Ras+ cancer cells transduced with control virus fluoresced more brightly than on day 5, but otherwise, continued to show the disorganization characteristic of breast cancer cells, in vitro (FIG. 27D). In contrast, on day 10, few, mostly small cells were present in with HIV-EGFP-Numb^{PRR}_/^{PTB}-transduced culture (FIG. 27E). Meanwhile, additional cells reverting to a normal, breast epithelial phenotype were identifiable in HIV-EGFP-Numblike transduced cultures (FIG. 27F).

### Example 44: Examples of Expressed or Targeted Transgenes Utilized in the Present Invention

[0678] Any transgene sequences (or their corresponding proteins) effective in fulfilling the present invention is suitable for use in the present invention. Suitable nucleotide sequences (or their corresponding proteins) may be drawn from any species so long as the desired cells or behavior is achieved. Likewise, the method of naming such sequences (or their corresponding proteins), either in lower case or upper case letters herein, does not imply a particular species. The sequences included in the accompanying sequence listing and stored in the NCBI database (listed by accession number) represent examples of sequences referenced above in the present application. They are also examples of specific transgene encoding sequences (cds) suitable for use in the present invention, but do not in any way limit the practice of the invention.
[0679] cardiotrophin1:U43030 (SEQ ID NO: 18). CNTF:BC074964 (SEQ ID NO: 19). GP130:NM_175767 (SEQ ID NO: 20). IL6:BC015511 (SEQ ID NO: 21); AB107656. HOXB4:NM_024015 (SEQ ID NO: 22); NM_010459. IL6R:NM_000565 (SEQ ID NO: 23); NM_181359. IL11:NM_133519 (SEQ ID NO: 24); NM_008350. LIF:NM_002309 (SEQ ID NO: 25); NM_008501; BB235045.
[0680] LIFR:NM_002310 (SEQ ID NO: 26). STAT3:NM_003150 (SEQ ID NO: 27); NM_213662; NM_139276. NUMB: AF171938 (SEQ ID NO: 28); AF171939 (SEQ ID NO: 29). AF171940 (SEQ ID NO: 30); AF171941 (SEQ ID NO: 31); NM_010949; NM_133287; BB483123; NM_010950; NM_010949; NM_004756; DQ022744. Numblike:NM_00475 (SEQ ID NO: 32); U96441; NM_010950; DQ022744. NANOG:NM_024865 (SEQ ID NO: 33); BC137873; NM_028016;
[0681] OncostatinM(OSM):NM_020530 (SEQ ID NO: 34). OSMR:NM_003999 (SEQ ID NO: 35); NP_003990.1 OCT3/4(POU5F1):NM_203289 (SEQ ID NO: 36); NM_002701 (SEQ ID NO: 37). SOX2:NM_003106 (SEQ ID NO: 38). FGF4:NM_002007 (SEQ ID NO: 39); NP_604391 Gata2:NM_032638 (SEQ ID NO: 40). Gata3:NM_001002295 (SEQ ID NO: 41).
[0682] Gata4:BC101580 (SEQ ID NO: 42). Gata5:BC117356 (SEQ ID NO: 43). Gata6:NM_005257 (SEQ ID NO: 44). HNF1:NM_000458 (SEQ ID NO: 45); NM_012669 (SEQ ID NO: 46). HNF3:X74936 (SEQ ID NO: 47). HNF3gammaX74938M (SEQ ID NO: 48). HNF3betaX74937 (SEQ ID NO: 49). HNF3G:AH008133 (SEQ ID NO: 50). HNF3A:AH008132 (SEQ ID NO: 51). HNF4alpha:NM_008261 (SEQ ID NO: 52). HNF4a:NM_022180 (SEQ ID NO: 53).
[0683] HNF6: U95945 (SEQ ID NO: 54). HLXB9:NM_001096823 (SEQ ID NO: 55); NM_019944. (SEQ ID NO: 56). NM_005515 (SEQ ID NO: 57). Lbx1:NM_006562 (SEQ ID NO: 58); NM_010691. Lmx1b (SEQ ID NO: 59); NM_010725 Neurogenin(NEUROG1):NM_006161 (SEQ ID NO: 60); BQ169355. Neurogenin2(NEUROG2):NM_024019 (SEQ ID NO: 61); DR001447. Neurogenin3(NEUROG3) (SEQ ID NO: 62); NM_009719. MASH1:NM_004316 (SEQ ID NO: 63). MyoD:NM_010866 (SEQ ID NO: 64); NM_002478 (SEQ ID NO: 65).
[0684] Myf5:NM_005593 (SEQ ID NO: 66); NM_131576.
[0685] Myf6:NM_002469 (SEQ ID NO: 67). NM_008657; NM_008657; NM_013172.
[0686] Ifrd1:NM_001007245 (SEQ ID NO: 68). Mcf2A:NM_013172 (SEQ ID NO: 69).
[0687] Myogenin: NM_002479 (SEQ ID NO: 70). Nkx2.2:NM_002509 (SEQ ID NO: 71).
[0688] Notch. Notch1:NM_017617 (SEQ ID NO: 72). NOTCH2:NM_024408; NM_010928. NOTCH3:NM_000435 (SEQ ID NO: 73). Nurr1:NM_006186 (SEQ ID NO: 74).
[0689] NOV(CCN3):NM_002514 (SEQ ID NO: 75). OLIG1:NM_138983 (SEQ ID NO: 76);
[0690] OLIG2:NM_005806 (SEQ ID NO: 77).
[0691] Pdx1:NM_000209 (SEQ ID NO: 78); Pet1(FEV):BC138435; NM_017521 (SEQ ID NO: 79).
[0692] Phox2a:NM_005169 (SEQ ID NO: 80). Phox2b:NM_003924 (SEQ ID NO: 81).
[0693] Pit1:NM_000306 (SEQ ID NO: 82). PITX3:NM_005029 (SEQ ID NO: 83);
[0694] RUNX1:NM_001001890 (SEQ ID NO: 84). Runx2:NM_001015051 (SEQ ID NO: 85); Shh: NM_000193 (SEQ ID NO: 86). Sox9:NM_000346 (SEQ ID NO: 87). Sox17:NM_022454 (SEQ ID NO: 88); BC140307; NM_011441.
[0695] DLX2:NM_004405 (SEQ ID NO: 89); NP_004396.1; NM_010054.
[0696] DLX5:NM_005221 (SEQ ID NO: 90); NM_005221; NP_005212.
[0697] HES1:NM_005524 (SEQ ID NO: 91); NP_005515.1; NM_008235; NP_032261.
[0698] FGF8:NM_006119 (SEQ ID NO: 92); NM_010205; NP_034335; NM_010205; NP_034335; NP_006110. NM_033163; NP_149353; NM_033164; NP_149354; NM_033165; NP_149355. PITX2:NM_000325 (SEQ ID NO: 93); NM_000325; NP_000316; NM_153426; NP_700475;
[0699] NM_153427; NP_700476; NM_001042502; NP_001035967; NM_001042504; NP_001035969.
[0700] REST4:DQ644039 (SEQ ID NO: 94). CREB_binding_protein:NM_134442 (SEQ ID NO: 95); NM_004379; NP_004370; NP_604391. Zfp488:NM_001013777 (SEQ ID NO: 96); BC089025; XM_224697; XP_224697. Foxa2:NM_021784 (SEQ ID NO: 97); NP_068556; NM_012743; NP_036875; NM_010446; NP_034576. Rnx REN:NM_000537 (SEQ ID NO: 98);
[0701] dHAND(HAND2):NM_021973 (SEQ ID NO: 99); NM_010402;
[0702] aspartoacylase (Canavan disease) (ASPA):NM_000049 (SEQ ID NO: 100); NM_023113. hexosaminidaseA(HEXA):NM_000520 (SEQ ID NO: 101).
[0703] Lesch_Nyhan_syndrome(HRPT):NM_000194 (SEQ ID NO: 102); NM_204848. Huntingtin; NM_010414; GUSB; NM_000181 (SEQ ID NO: 103); NM_010368.
[0704] NPC1:NM_000271; NM_006432. hexosaminidaseB:NM_000521 (SEQ ID NO: 104). galactosidase,alpha(GLA):NM_000169 (SEQ ID NO: 105).
[0705] glucosidase_beta_acid(GBA):NM_000157 (SEQ ID NO: 106); NM_008094. von_Hippel_Lindau_tumor_suppressor(VHL):NM_000551 (SEQ ID NO: 107). Beta_globin(HBB):NM_000518 (SEQ ID NO: 108). PARK2:NM_013988 (SEQ ID NO: 109); NM_004562; NM_020093.

[0706] The contents of all parenthetically cited publications and the following United States patents, are noted and incorporated by reference in their entireties, including: U.S. Pat. Nos. 7,211,247, 5,677,139, 6,432,711 and 5,453,357, 5,593,875, 5,783,566, 5,928,944, 5,910,488, and 5,824,547.

The application's sequence listing, which the Patent Office published only in electronic form, follows.

SEQUENCE LISTING (238 sequences)

SEQ ID NO: 1 - DNA, 8069 bp, synthetic construct
  source 1..8069: mol_type = other DNA
aatgtagtcttatgcaatactcttgtagtcttgcaacatggtaacgatgagttagcaacatgccttacaaggagagaaaaagcaccgtgcatgccgattggtggaagtaaggtggtacgatcgtgccttattaggaaggcaacagacgggtctgacatggattggacgaaccactgaattgccgcattgcagagatattgtatttaagtgcctagctcgatacataaacgggtctctctggttagaccagatctgagcctgggagctctctggctaactagggaacccactgcttaagcctcaataaagcttgccttgagtgcttcaagtagtgtgtgcccgtctgttgtgtgactctggtaactagagatccctcagacccttttagtcagtgtggaaaatctctagcagtggcgcccgaacagggacttgaaagcgaaagggaaaccagaggagctctctcgacgcaggactcggcttgctgaagcgcgcacggcaagaggcgaggggcggcgactggtgagtacgccaaaaattttgactagcggaggctagaaggagagagatgggtgcgagagcgtcagtattaagcgggggagaattagatcgcgatgggaaaaaattcggttaaggccagggggaaagaaaaaatataaattaaaacatatagtatgggcaagcagggagctagaacgattcgcagttaatcctggcctgttagaaacatcagaaggctgtagacaaatactgggacagctacaaccatcccttcagacaggatcagaagaacttagatcattatataatacagtagcaaccctctattgtgtgcatcaaaggatagagataaaagacaccaaggaagctttagacaagatagaggaagagcaaaacaaaagtaagaccaccgcacagcaagcggccgctgatcttcagacctggaggaggagatatgagggacaattggagaagtgaattatataaatataaagtagtaaaaattgaaccattaggagtagcacccaccaaggcaaagagaagagtggtgcagagagaaaaaagagcagtgggaataggagctttgttccttgggttcttgggagcagcaggaagcactatgggcgcagcgtcaatgacgctgacggtacaggccagacaattattgtctggtatagtgcagcagcagaacaatttgctgagggctattgaggcgcaacagcatctgttgcaactcacagtctggggcatcaagcagctccaggcaagaatcctggctgtggaaagatacctaaaggatcaacagctcctggggatttggggttgctctggaaaactcatttgcaccactgctgtgccttggaatgctagttggagtaataaatctctggaacagatttggaatcacacgacctggatggagtgggacagagaaattaacaattacacaagcttaatacactccttaattgaagaatcgcaaaaccagcaagaaaagaatgaacaagaattattggaattagataaatgggcaagtttgtggaattggtttaacataacaaattggctgtggtatataaaattattcataatgatagtaggaggcttggtaggtttaagaatagtttttgctgtactttctatagtgaatagagttaggcagggatattcaccattatcgtttcagacccacctcccaaccccgaggggacccgacaggcccgaaggaatagaagaagaaggtggagagagagacagagacagatccattcgattagtgaacggatctcgacggtatcgatgtcgacgttaacgctagtgatatcaactttgtatagaaaagttgaacgagaaacgtaaaatgatataaatatcaatatattaaattagattttgcataaaaaacagactacataatactgtaaaacacaacatatccagtcactatggcggccgcattaggcaccccaggctttacactttatgcttccggctcgtataatgtgtggattttgagttaggatccgtcgagattttcaggagctaaggaagctaaaatggagaaaaaaatcactggatataccaccgttgatatatcccaatggcatcgtaaagaacattttgaggcatttcagtcagttgctcaatgtacctataaccagaccgttcagctggatattacggcctttttaaagaccgtaaagaaaaataagcacaagttttatccggcctttattcacattcttgcccgcctgatgaatgctcatccggaattccgtatggcaatgaaagacggtgagctggtgatatgggatagtgttcacccttgttacaccgttttccatgagcaaactgaaacgttttcatcgctctggagtgaataccacgacgatttccggcagtttctacacatatattcgcaagatgtggcgtgttacggtgaaaacctggcctatttccctaaagggtttattgagaatatgtttttcgtctcagccaatccctgggtgagtttcaccagttttgatttaaacgtggccaatatggacaacttcttcgcccccgttttcaccatgggcaaatattatacgcaaggcgacaaggtgctgatgccgctggcgattcaggttcatcatgccgtttgtgatggcttccatgtcggcagaatgcttaatgaattacaacagtactgcgatgagtggcagggcggggcgtaaagatctggatccggcttactaaaagccagataacagtatgcgtatttgcgcgctgatttttgcggtataagaatatatactgatatgtatacccgaagtatgtcaaaaagaggtatgctatgaagcagcgtattacagtgacagttgacagcgacagctatcagttgctcaaggcatatatgatgtcaatatctccggtctggtaagcacaaccatgcagaatgaagcccgtcgtctgcgtgccgaacgctggaaagcggaaaatcaggaagggatggctgaggtcgcccggtttattgaaatgaacggctcttttgctgacgagaacagggactggtgaaatgcagtttaaggtttacacctataaaagagagagccgttatcgtctgtttgtggatgtacagagtgatattattgacacgcccgggcgacggatggtgatccccctggccagtgcacgtctgctgtcagataaagtctcccgtgaactttacccggtggtgcatatcggggatgaaagctggcgcatgatgaccaccgatatggccagtgtgccggtctccgttatcggggaagaagtggctgatctcagccaccgcgaaaatgacatcaaaaacgccattaacctgatgttctggggaatataaatgtcaggctccgttatacacagccagtctgcaggtcgaccatagtgactggatatgttgtgttttacagtattatgtagtctgttttttatgcaaaatctaatttaatatattgatatttatatcattttacgtttctcgttcagctttcttgtacaaagtggttgatatccagcacagtggcggccgctcgagtctagagggcccgcggttcgaaggtaagcctatccctaaccctctcctcggtctcgattctacgcgtaccggttagtaatgagtttggaattaattctgtggaatgtgtgtcagttagggtgtggaaagtccccaggctccccagcaggcagaagtatgcaaagcatgcatctcaattagtcagcaaccaggtgtggaaagtccccaggctccccagcaggcagaagtatgcaaagcatgcatctcaattagtcagcaaccatagtcccgcccctaactccgcccatcccgcccctaactccgcccagttccgcccattctccgccccatggctgactaattttttttatttatgcagaggccgaggccgcctctgcctctgagctattccagaagtagtgaggaggcttttttggaggcctaggcttttgcaaaaagctcccgggagcttgtatatccattttcggatctgatcagcacgtgttgacaattaatcatcggcatagtatatcggcatagtataatacgacaaggtgaggaactaaaccatggccaagcctttgtctcaagaagaatccaccctcattgaaagagcaacggctacaatcaacagcatccccatctctgaagactacagcgtcgccagcgcagctctctctagcgacggccgcatcttcactggtgtcaatgtatatcattttactgggggaccttgtgcagaactcgtggtgctgggcactgctgctgctgcggcagctggcaacctgacttgtatcgtcgcgatcggaaatgagaacaggggcatcttgagcccctgcggacggtgccgacaggtgcttctcgatctgcatcctgggatcaaagccatagtgaaggacagtgatggacagccgacggcagttgggattcgtgaattgctgccctctggttatgtgtgggagggctaagcacaattcgagctcggtacctttaagaccaatgacttacaaggcagctgtagatcttagccactttttaaaagaaaaggggggactggaagggctaattcactcccaacgaagacaagatctgctttttgcttgtactgggtctctctggttagaccagatctgagcctgggagctctctggctaactagggaacccactgcttaagcctcaataaagcttgccttgagtgcttcaagtagtgtgtgcccgtctgttgtgtgactctggtaactagagatccctcagacccttttagtcagtgtggaaaatctctagcagtagtagttcatgtcatcttattattcagtatttataacttgcaaagaaatgaatatcagagagtgagaggaacttgtttattgcagcttataatggttacaaataaagcaatagcatcacaaatttcacaaataaagcatttttttcactgcattctagttgtggtttgtccaaactcatcaatgtatcttatcatgtctggctctagctatcccgcccctaactccgcccatcccgcccctaactccgcccagttccgcccattctccgccccatggctgactaattttttttatttatgcagaggccgaggccgcctcggcctctgagctattccagaagtagtgaggaggcttttttggaggcctagggacgtacccaattcgccctatagtgagtcgtattacgcgcgctcactggccgtcgttttacaacgtcgtgactgggaaaaccctggcgttacccaacttaatcgccttgcagcacatccccctttcgccagctggcgtaatagcgaagaggcccgcaccgatcgcccttcccaacagttgcgcagcctgaatggcgaatgggacgcgccctgtagcggcgcattaagcgcggcgggtgtggtggttacgcgcagcgtgaccgctacacttgccagcgccctagcgcccgctcctttcgctttcttcccttcctttctcgccacgttcgccggctttccccgtcaagctctaaatcgggggctccctttagggttccgatttagtgctttacggcacctcgaccccaaaaaacttgattagggtgatggttcacgtagtgggccatcgccctgatagacggtttttcgccctttgacgttggagtccacgttctttaatagtggactcttgttccaaactggaacaacactcaaccctatctcggtctattcttttgatttataagggattttgccgatttcggcctattggttaaaaaatgagctgatttaacaaaaatttaacgcgaattttaacaaaatattaacgcttacaatttaggtggcacttttcggggaaatgtgcgcggaacccctatttgtttatttttctaaatacattcaaatatgtatccgctcatgagacaataaccctgataaatgcttcaataatattgaaaaaggaagagtatgagtattcaacatttccgtgtcgcccttattcccttttttgcggcattttgccttcctgtttttgctcacccagaaacgctggtgaaagtaaaagatgctgaagatcagttgggtgcacgagtgggttacatcgaactggatctcaacagcggtaagatccttgagagttttcgccccgaagaacgttttccaatgatgagcacttttaaagttctgctatgtggcgcggtattatcccgtattgacgccgggcaagagcaactcggtcgccgcatacactattctcagaatgacttggttgagtactcaccagtcacagaaaagcatcttacggatggcatgacagtaagagaattatgcagtgctgccataaccatgagtgataacactgcggccaacttacttctgacaacgatcggaggaccgaaggagctaaccgcttttttgcacaacatgggggatcatgtaactcgccttgatcgttgggaaccggagctgaatgaagccataccaaacgacgagcgtgacaccacgatgcctgtagcaatggcaacaacgttgcgcaaactattaactggcgaactacttactctagcttcccggcaacaattaatagactggatggaggcggataaagttgcaggaccacttctgcgctcggcccttccggctggctggtttattgctgataaatctggagccggtgagcgtgggtctcgcggtatcattgcagcactggggccagatggtaagccctcccgtatcgtagttatctacacgacggggagtcaggcaactatggatgaacgaaatagacagatcgctgagataggtgcctcactgattaagcattggtaactgtcagaccaagtttactcatatatactttagattgatttaaaacttcatttttaatttaaaaggatctaggtgaagatcctttttgataatctcatgaccaaaatcccttaacgtgagttttcgttccactgagcgtcagaccccgtagaaaagatcaaaggatcttcttgagatcctttttttctgcgcgtaatctgctgcttgcaaacaaaaaaaccaccgctaccagcggtggtttgtttgccggatcaagagctaccaactctttttccgaaggtaactggcttcagcagagcgcagataccaaatactgttcttctagtgtagccgtagttaggccaccacttcaagaactctgtagcaccgcctacatacctcgctctgctaatcctgttaccagtggctgctgccagtggcgataagtcgtgtcttaccgggttggactcaagacgatagttaccggataaggcgcagcggtcgggctgaacggggggttcgtgcacacagcccagcttggagcgaacgacctacaccgaactgagatacctacagcgtgagctatgagaaagcgccacgcttcccgaagggagaaaggcggacaggtatccggtaagcggcagggtcggaacaggagagcgcacgagggagcttccagggggaaacgcctggtatctttatagtcctgtcgggtttcgccacctctgacttgagcgtcgatttttgtgatgctcgtcaggggggcggagcctatggaaaaacgccagcaacgcggcctttttacggttcctggccttttgctggccttttgctcacatgttctttcctgcgttatcccctgattctgtggataaccgtattaccgcctttgagtgagctgataccgctcgccgcagccgaacgaccgagcgcagcgagtcagtgagcgaggaagcggaagagcgcccaatacgcaaaccgcctctccccgcgcgttggccgattcattaatgcagctggcacgacaggtttcccgactggaaagcgggcagtgagcgcaacgcaattaatgtgagttagctcactcattaggcaccccaggctttacactttatgcttccggctcgtatgttgtgtggaattgtgagcggataacaatttcacacaggaaacagctatgaccatgattacgccaagcgcgcaattaaccctcactaaagggaacaaaagctggagctgcaagctt

SEQ ID NO: 2 - DNA, 22460 bp, synthetic construct
  source 1..22460: mol_type = other DNA
aatgtagtcttatgcaatactcttgtagtcttgcaacatggtaacgatgagttagcaacatgccttacaaggagagaaaaagcaccgtgcatgccgattggtggaagtaaggtggtacgatcgtgccttattaggaaggcaacagacgggtctgacatggattggacgaaccactgaattgccgcattgcagagatattgtatttaagtgcctagctcgatacataaacgggtctctctggttagaccagatctgagcctgggagctctctggctaactagggaacccactgcttaagcctcaataaagcttgccttgagtgcttcaagtagtgtgtgcccgtctgttgtgtgactctggtaactagagatccctcagacccttttagtcagtgtggaaaatctctagcagtggcgcccgaacagggacttgaaagcgaaagggaaaccagaggagctctctcgacgcaggactcggcttgctgaagcgcgcacggcaagaggcgaggggcggcgactggtgagtacgccaaaaattttgactagcggaggctagaaggagagagatgggtgcgagagcgtcagtattaagcgggggagaattagatcgcgatgggaaaaaattcggttaaggccagggggaaagaaaaaatataaattaaaacatatagtatgggcaagcagggagctagaacgattcgcagttaatcctggcctgttagaaacatcagaaggctgtagacaaatactgggacagctacaaccatcccttcagacaggatcagaagaacttagatcattatataatacagtagcaaccctctattgtgtgcatcaaaggatagagataaaagacaccaaggaagctttagacaagatagaggaagagcaaaacaaaagtaagaccaccgcacagcaagcggccgctgatcttcagacctggaggaggagatatgagggacaattggagaagtgaattatataaatataaagtagtaaaaattgaaccattaggagtagcacccaccaaggcaaagagaagagtggtgcagagagaaaaaagagcagtgggaataggagctttgttccttgggttcttgggagcagcaggaagcactatgggcgcagcgtcaatgacgctgacggtacaggccagacaattattgtctggtatagtgcagcagcagaacaatttgctgagggctattgaggcgcaacagcatctgttgcaactcacagtctggggcatcaagcagctccaggcaagaatcctggctgtggaaagatacctaaaggatcaacagctcctggggatttggggttgctctggaaaactcatttgcaccactgctgtgccttggaatgctagttggagtaataaatctctggaacagatttggaatcacacgacctggatggagtgggacagagaaattaacaattacacaagcttaatacactccttaattgaagaatcgcaaaaccagcaagaaaagaatgaacaagaattattggaattagataaatgggcaagtttgtggaattggtttaacataacaaattggctgtggtatataaaattattcataatgatagtaggaggcttggtaggtttaagaatagtttttgctgtactttctatagtgaatagagttaggcagggatattcaccattatcgtttcagacccacctcccaaccccgaggggacccgacaggcccgaaggaatagaagaagaaggtggagagagagacagagacagatccattcgattagtgaacggatctcgacggtatcgatgtcgacgttaacgctagtgatatcaactttgtatagaaaagttgaacgagaaacgtaaaatgatataaatatcaatatattaaattagattttgcataaaaaacagactacataatactgtaaaacacaacatatccagtcactatgggacggatcgggagatctcccgatcccctatggtgcactctcagtacaatctgctctgatgccgcatagttaagccagtatctgctccctgcttgtgtgttggaggtcgctgagtagtgcgcgagcaaaatttaagctacaacaaggcaaggcttgaccgacaattgcatgaagaatctgcttagggttaggcgttttgcgctgcttcgcgatgtacgggccagatatacgcgttgacattgattattgactagttattaatagtaatcaattacggggtcattagttcatagcccatatatggagttccgcgttacataacttacggtaaatggcccgcctggctgaccgcccaacgacccccgcccattgacgtcaataatgacgtatgttcccatagtaacgccaatagggactttccattgacgtcaatgggtggagtatttacggtaaactgcccacttggcagtacatcaagtgtatcatatgccaagtacgccccctattgacgtcaatgacggtaaatggcccgcctggcattatgcccagtacatgaccttatgggactttcctacttggcagtacatctacgtattagtcatcgctattaccatggtgatgcggttttggcagtacatcaatgggcgtggatagcggtttgactcacggggatttccaagtctccaccccattgacgtcaatgggagtttgttttggaaccaaaatcaacgggactttccaaaatgtcgtaacaactccgccccattgacgcaaatgggcggtaggcgtgtacggtgggaggtctatataagcagagctctccctatcagtgatagagatctccctatcagtgatagagatcgtcgacgagctcgtttagtgaaccgtcagatcgcctggagacgccatccacgctgttttgacctccatagaagacaccgggaccgatccagcctccggactctagcgtttaaacttaagcttaccatgccttcgcaagccctcatttcaccaggcccccggcttggggcgccttccttccccatggcgggacacctggcttcggatttcgccttctcgccccctccaggtggtggaggtgatgggccaggggggccggagccgggctgggttgatcctcggacctggctaagcttccaaggccctcctggagggccaggaatcgggccgggggttgggccaggctctgaggtgtgggggattcccccatgccccccgccgtatgagttctgtggggggatggcgtactgtgggccccaggttggagtggggctagtgccccaaggcggcttggagacctctcagcctgagggcgaagcaggagtcggggtggagagcaactccgatggggcctccccggagccctgcaccgtcacccctggtgccgtgaagctggagaaggagaagctggagcaaaacccggaggagtcccaggacatcaaagctctgcagaaagaactcgagcaatttgccaagctcctgaagcagaagaggatcaccctgggatatacacaggccgatgtggggctcaccctgggggttctatttgggaaggtattcagccaaacgaccatctgccgctttgaggctctgcagcttagcttcaagaacatgtgtaagctgcggcccttgctgcagaagtgggtggaggaagctgacaacaatgaaaatcttcaggagatatgcaaagcagaaaccctcgtgcaggcccgaaagagaaagcgaaccagtatcgagaaccgagtgagaggcaacctggagaatttgttcctgcagtgcccgaaacccacactgcagcagatcagccacatcgcccagcagcttgggctcgagaaggatgtggtccgagtgtggttctgtaaccggcgccagaagggcaagcgatcaagcagcgactatgcacaacgagaggattttgaggctgctgggtctcctttctcagggggaccagtgtcctttcctctggccccagggccccattttggtaccccaggctatgggagccctcacttcactgcactgtactcctcggtccctttccctgagggggaagcctttccccctgtctccgtcaccactctgggctctcccatgcattcaaactgaggtgcctgcccttctaggaatgggggacagggggaggggaggagctagggaaagaaaacctggagtttgtgccagggtttttgggattaagttcttcattcactaaggaaggaattgggaacacaaagggtgggggcaggggagtttggggcaactggttggagggaaggtgaagttcaatgatgctcttgattttaatcccacatcatgtatcacttttttcttaaataaagaagcctgggacacagtagatagacacacttaaaaaaaaaaacctcgactgtgccttctagttgccagccatctgttgtttgcccctcccccgtgccttccttgaccctggaaggtgccactcccactgtcctttcctaataaaatgaggaaattgcatcgcattgtctgagtaggtgtcattctattctggggggtggggtggggcaggacagcaagggggaggattgggaagacaatagcaggcatgctggggatgcggtgggctctatgggacggatcgggagatctcccgatcccctatggtgcactctcagtacaatcttgctctgatgccgcatagttaagccagtatctgctccctgcttgtgtgttggaggtcgctgagtagtgcgcgagcaaaatttaagctacaacaaggcaaggcttgaccgacaattgcatgaagaatctgcttagggttaggcgttttgcgctgcttcgcgatgtacgggccagatatacgcgttgacattgattattgactagttattaatagtaatcaattacggggtcattagttcatagcccatatatggagttccgcgttacataacttacggtaaatggcccgcctggctgaccgcccaacgacccccgcccattgacgtcaataatgacgtatgttcccatagtaacgccaatagggactttccattgacgtcaatgggtggagtatttacggtaaactgcccacttggcagtacatcaagtgtatcatatgccaagtacgccccctattgacgtcaatgacggtaaatggcccgcctggcattatgcccagtacatgaccttatgggactttcctacttggcagtacatctacgtattagtcatcgctattaccatggtgatgcggttttggcagtacatcaatgggcgtggatagcggtttgactcacggggatttccaagtctccaccccattgacgtcaatgggagtttgttttggaaccaaaatcaacgggactttccaaaatgtcgtaacaactccgccccattgacgcaaatgggcggtaggcgtgtacggtgggaggtctatataagcagagctctccctatcagtgatagagatctccctatcagtgatagagatcgtcgacgagctcgtttagtgaaccgtcagatcgcctggagacgccatccacgctgttttgacctccatagaagacaccgggaccgatccagcctccggactctagcgtttaaacttaagcttaccatgctattaacttgttcaaaaaagtatcaggagttgtcaaggcagagaagagagtgtttgcaaaagggggaaagtagtttgctgcctctttaagactaggactgagagaaagaagaggagagagaaagaaagggagagaagtttgagccccaggcttaagcctttccaaaaaataataataacaatcatcggcggcggcaggatcggccagaggaggagggaagcgctttttttgatcctgattccagtttgcctctctctttttttcccccaaattattcttcgcctgattttcctcgcggagccctgcgctcccgacacccccgcccgcctcccctcctcctctccccccgcccgcgggccccccaaagtcccggccgggccgagggtcggcggccgccggcgggccgggcccgcgcacagcgcccgcatgtacaacatgatggagacggagctgaagccgccgggcccgcagcaaacttcggggggcggcggcggcaactccaccgcggcggcggccggcggcaaccagaaaaacagcccggaccgcgtcaagcggcccatgaatgccttcatggtgtggtcccgcgggcagcggcgcaagatggcccaggagaaccccaagatgcacaactcggagatcagcaagcgcctgggcgccgagtggaaacttttgtcggagacggagaagcggccgttcatcgacgaggctaagcggctgcgagcgctgcacatgaaggagcacccggattataaataccggccccggcggaaaaccaagacgctcatgaagaaggataagtacacgctgcccggcgggctgctggcccccggcggcaatagcatggcgagcggggtcggggtgggcgccggcctgggcgcgggcgtgaaccagcgcatggacagttacgcgcacatgaacggctggagcaacggcagctacagcatgatgcaggaccagctgggctacccgcagcacccgggcctcaatgcgcacggcgcagcgcagatgcagcccatgcaccgctacgacgtgagcgccctgcagtacaactccatgaccagctcgcagacctacatgaacggctcgcccacctacagcatgtcctactcgcagcagggcacccctggcatggctcttggctccatgggttcggtggtcaagtccgaggccagctccagcccccctgtggttacctcttcctcccactccagggcgccctgccaggccggggacctccgggacatgatcagcatgtatctccccggcgccgaggtgccggaacccgccgcccccagcagacttcacatgtcccagcactaccagagcggcccggtgcccggcacggccattaacggcacactgcccctctcacacatgtgagggccggacagcgaactggaggggggagaaattttcaaagaaaaacgagggaaatgggaggggtgcaaaagaggagagtaagaaacagcatggagaaaacccggtacgctcaaaaagaaaaaggaaaaaaaaaaatcccatcacccacagcaaatgacagctgcaaaagagaacaccaatcccatccacactcacgcaaaaaccgcgatgccgacaagaaaacttttatgagagagatcctggacttctttttgggggactatttttgtacagagaaaacctggggagggtggggagggcgggggaatggaccttgtatagatctggaggaaagaaagctacgaaaaactttttaaaagttctagtggtacggtaggagctttgcaggaagtttgcaaaagtctttaccaataatatttagagctagtctccaagcgacgaaaaaaatgttttaatatttgcaagcaacttttgtacagtatttatcgagataaacatggcaatcaaaatgtccattgtttataagctgagaatttgccaatatttttcaaggagaggcttcttgctgaattttgattctgcagctgaaatttaggacagttgcaaacgtgaaaagaagaaaattattcaaatttggacattttaattgtttaaaaattgtacaaaaggaaaaaattagaataagtactggcgaaccatctctgtggtcttgtttaaaaagggcaaaagttttagactgtactaaattttataacttactgttaaaagcaaaaatggccatgcaggttgacaccgttggtaatttataatagcttttgttcgatcccaactttccattttgttcagataaaaaaaaccatgaaattactgtgtttgaaatattttcttatggtttgtaatatttctgtaaatttattgtgatattttaaggttttcccccctttattttccgtagttgtattttaaaagattcggctctgtattatttgaatcagtctgccgagaatccatgtatatatttgaactaatatcatccttataacaggtacattttcaacttaagtttttactccattatgcacagtttgagataaataaatttttgaaatatggacactgaaaaaaaaaaaaaaaaaacctcgactgtgccttctagttgccagccatctgttgtttgcccctcccccgtgccttccttgaccctggaaggtgccactcccactgtcctttcctaataaaatgaggaaattgcatcgcattgtctgagtaggtgtcattctattctggggggtggggtggggcaggacagcaagggggaggattgggaagacaatagcaggcatgctggggatgcggtgggctctatgggacggatcgggagatctcccgatcccctatggtgcactctcagtacaatctgctctgatgccgcatagttaagccagtatctgctccctgcttgtgtgttggaggtcgctgagtagtgcgcgagcaaaatttaagctacaacaaggcaaggcttgaccgacaattgcatgaagaatctgcttagggttaggcgttttgcgctgcttcgcgatgtacgggccagatatacgcgttgacattgattattgactagttattaatagtaatcaattacggggtcattagttcatagcccatatatggagttccgcgttacataacttacggtaaatggcccgcctggctgaccgcccaacgacccccgcccattgacgtcaataatgacgtatgttcccatagtaacgccaatagggactttccattgacgtcaatgggtggagtatttacggtaaactgcccacttggcagtacatcaagtgtatcatatgccaagtacgccccctattgacgtcaatgacggtaaatggcccgcctggcattatgcccagtacatgaccttatgggactttcctacttggcagtacatctacgtattagtcatcgctattaccatggtgatgcggttttggcagtacatcaatgggcgtggatagcggtttgactcacggggatttccaagtctccaccccattgacgtcaatgggagtttgttttggaaccaaaatcaacgggactttccaaaatgtcgtaacaactccgccccattgacgcaaatgggcggtaggcgtgtacggtgggaggtctatataagcagagctctccctatcagtgatagagatctccctatcagtgatagagatcgtcgacgagctcgtttagtgaaccgtcagatcgcctggagacgccatccacgctgttttgacctccatagaagacaccgggaccgatccagcctccggactctagcgtttaaacttaagcttaccatggttgtcatgggggaggtggtggcgcttggtggccactggcggccgaggtagaggcagtggcgcttgagttggtcgggggcagcggcagatttgaggcttaagcaacttcttccggggaagagtgccagtgcagccactgttacaattcaagatcttgatctatatccatagattggaatattggtgggccagcaatcctcagacgcctcacttaggacaaatgaggaaactgaggcttggtgaagttacgaaacttgtccaaaatcacacaacttgtaaagggcacagccaagattcagagccaggctgtaaaaattaaaatgaacaaattacggcaaagttttaggagaaagaaggatgtttatgttccagaggccagtcgtccacatcagtggcagacagatgaagaaggcgttcgcaccggaaaatgtagcttcccggttaagtaccttggccatgtagaagttgatgaatcaagaggaatgcacatctgtgaagatgctgtaaaaagattgaaagctgaaaggaagttcttcaaaggcttctttggaaaaactggaaagaaagcagttaaagcagttctgtgggtctcagcagatggactcagagttgtggatgaaaaaactaaggacctcatagttgaccagacgatagagaaagtttctttctgtgccccagacaggaactttgatagagccttttcttacatatgccgtgatggcaccactcgtcgctggatctgtcactgcttcatggctgtcaaggacacaggtgaaaggttgagccatgcagtaggctgtgcttttgcagcctgtttagagcgcaagcagaagcgggagaaggaatgtggagtgactgctacttttgatgctagtcggaccacttttacaagagaaggatcattccgtgtcacaacagccactgaacaagcagaaagagaggagatcatgaaacaaatgcaagatgccaagaaagctgaaacagataagatagtcgttggttcatcagttgcccctggcaacactgccccatccccatcctctcccacctctcctacttctgatgccacgacctctctggagatgaacaatcctcatgccatcccacgccggcatgctccaattgaacagcttgctcgccaaggctctttccgaggttttcctgctcttagccagaagatgtcaccctttaaacgccaactatccctacgcatcaatgagttgccttccactatgcagaggaagactgatttccccattaaaaatgcagtgccagaagtagaaggggaggcagagagcatcagctccctgtgctcacagatcaccaatgccttcagcacacctgaggaccccttctcatctgctccgatgaccaaaccagtgacagtggtggcaccacaatctcctaccttccaagctaatggcactgactcagccttccatgtgcttgctaagccagcccatactgctctagcacccgtagcaatgcctgtgcgtgaaaccaacccttgggcccatgcccctgatgctgctaacaaggaaattgcagccacatgttcggggaccgagtggggtcaatcttctggtgctgcctctccaggtctcttccaggccggtcatagacgtactccctctgaggccgaccgatggttagaagaggtgtctaagagcgtccgggctcagcagccccaggcctcagctgctcctctgcagccagttctccagcctcctccacccactgccatctcccagccagcatcacctttccaagggaatgcattcctcacctctcagcctgtgccagtgggtgtggtcccagccctgcaaccagcctttgtccctgcccagtcctatcctgtggccaatggaatgccctatccagcccctaatgtgcctgtggtgggcatcactccctcccagatggtggccaacgtatttggcactgcaggccaccctcaggctgcccatccccatcagtcacccagcctggtcaggcagcagacattccctcactacgaggcaagcagtgctaccaccagtcccttctttaagcctcctgctcagcacctcaacggttctgcagctttcaatggtgtagatgatggcaggttggcctcagcagacaggcatacagaggttcctacaggcacctgcccagtggatccttttgaagcccagtgggctgcattagaaaataagtccaagcagcgtactaatccctcccctaccaaccctttctccagtgacttacagaagacgtttgaaattgaactttaagcaatcattatggctatgtatcttgtccataccagacagggagcagggggtagcggtcaaaggagcaaaacagactttgtctcctgattagtactcttttcactaatcccaaaggtcccaaggaacaagtccaggcccagagtactgtgaggggtgattttgaaagacatgggaaaaagcattcctagagaaaagctgccttgcaattaggctaaagaagtcaaggaaatgttgctttctgtactccctcttcccttacccccttacaaatctctggcaacagagaggcaaagtatctgaacaagaatctatattccaagcacatttactgaaatgtaaaacacaacaggaagcaaagcaatctccctttgtttttcaggccattcacctgcctcctgtcagtagtggcctgtattagagatcaagaagagtggtttgtgctcaggctggggaacagagaggcacgctatgctgccagaattcccaggagggcatatcagcaactgcccagcagagctatattttgggggagaagttgagcttccattttgagtaacagaataaatattatatatatcaaaagccaaaatctttatttttatgcatttagaatattttaaatagttctcagatattaagaagttgtatgagttgtaagtaatcttgccaaaggtaaaggggctagttgtaagaaattgtacataagattgatttatcattgatgcctactgaaataaaaagaggaaaggctggaagctgcagacaggatccctagcttgttttctgtcagtcattcattgtaagtagcacattgcaacaacaatcatgcttatgaccaatacagtcactaggttgtagttttttttaaataaaggaaaagcagtattgtcctggttttaaacctatgatggaattctaatgtcattattttaatggaatcaatcgaaatatgctctatagagaatatatcttttatatattgctgcagtttccttatgttaatcctttaacactaaggtaacatgacataatcataccatagaagggaacacaggttaccatattggtttgtaatatgggtcttggtgggttttgttttatcctttaaattttgttcccatgagttttgtggggatggggattctggttttattagctttgtgtgtgtcctcttcccccaaacccccttttggtgagaacatccccttgacagttgcagcctcttgacctcggataacaataagagagctcatctcatttttacttttgaacgttggccttacaatcaaatgtaagttatatatatttgtactgatgaaaatttataatctgctttaacaaaaataaatgttcatggtagaagcttttaaaaaaaaaaaaacctcgactgtgccttctagttgccagccatctgttgtttgcccctcccccgtgccttccttgaccctggaaggtgccactcccactgtcctttcctaataaaatgaggaaattgcatcgcattgtctgagtaggtgtcattctattctggggggtggggtggggcaggacagcaagggggaggattgggaagacaatagcaggcatgctggggatgcggtgggctctatgggacggatcgggagatctcccgatcccctatggtgcactctcagtacaatctgctctgatgccgcatagttaagccagtatctgctccctgcttgtgtgttggaggtcgctgagtagtgcgcgagcaaaatttaagctacaacaaggcaaggcttgaccgacaattgcatgaagaatctgcttagggttaggcgttttgcgctgcttcgcgatgtacgggccagatatacgcgttgacattgattattgactagttattaatagtaatcaattacggggtcattagttcatagcccatatatggagttccgcgttacataacttacggtaaatggcccgcctggctgaccgcccaacgacccccgcccattgacgtcaataatgacgtatgttcccatagtaacgccaatagggactttccattgacgtcaatgggtggagtatttacggtaaactgcccacttggcagtacatcaagtgtatcatatgccaagtacgccccctattgacgtcaatgacggtaaatggcccgcctggcattatgcccagtacatgaccttatgggactttcctacttggcagtacatctacgtattagtcatcgctattaccatggtgatgcggttttggcagtacatcaatgggcgtggatagcggtttgactcacggggatttccaagtctccaccccattgacgtcaatgggagtttgttttggaaccaaaatcaacgggactttccaaaatgtcgtaacaactccgccccattgacgcaaatgggcggtaggcgtgtacggtgggaggtctatataagcagagctctccctatcagtgatagagatctccctatcagtgatagagatcgtcgacgagctcgtttagtgaaccgtcagatcgcctggagacgccatccacgctgttttgacctccatagaagacaccgggaccgatccagcctccggactctagcgtttaaacttaagcttaccatggtgagcaagggcgaggagctgttcaccggggtggtgcccatcctggtcgagctggacggcgacgtaaacggccacaagttcagcgtgtccggcgagggcgagggcgatgccacctacggcaagctgaccctgaagttcatctgcaccaccggcaagctgcccgtgccctggcccaccctcgtgaccaccttcacctacggcgtgcagtgcttcgcccgctaccccgaccacatgaagcagcacgacttcttcaagtccgccatgcccgaaggctacgtccaggagcgcaccatcttcttcaaggacgacggcaactacaagacccgcgccgaggtgaagttcgagggcgacaccctggtgaaccgcatcgagctgaagggcatcgacttcaaggaggacggcaacatcctggggcacaagctggagtacaactacaacagccacaaggtctatatcaccgccgacaagcagaagaacggcatcaaggtgaacttcaagacccgccacaacatcgaggacggcagcgtgcagctcgccgaccactaccagcagaacacccccatcggcgacggccccgtgctgctgcccgacaaccactacctgagcacccagtccgccctgagcaaagaccccaacgagaagcgcgatcacatggtcctgctggagttcgtgaccgccgccgggatcactctcggcatggacgagctgtacaagtaacctcgactgtgccttctagttgccagccatctgttgtttgcccctcccccgtgccttccttgaccctggaaggtgccactcccactgtcctttcctaataaaatgaggaaattgcatcgcattgtctgagtaggtgtcattctattctggggggtggggtggggcaggacagcaagggggaggattgggaagacaatagcaggcatgctggggatgcggtgggctctatgggacggatcgggagatctcccgatcccctatggtgcactctcagtacaatctgctctgatgccgcatagttaagccagtatctgctccctgcttgtgtgttggaggtcgctgagtagtgcgcgagcaaaatttaagctacaacaaggcaaggcttgaccgacaattgcatgaagaatctgcttagggttaggcgttttgcgctgcttcgcgatgtacgggccagatatacgcgttgacattgattattgactagttattaatagtaatcaattacggggtcattagttcatagcccatatatggagttccgcgttacataacttacggtaaatggcccgcctggctgaccgcccaacgacccccgcccattgacgtcaataatgacgtatgttcccatagtaacgccaatagggactttccattgacgtcaatgggtggagtatttacggtaaactgcccacttggcagtacatcaagtgtatcatatgccaagtacgccccctattgacgtcaatgacggtaaatggcccgcctggcattatgcccagtacatgaccttatgggactttcctacttggcagtacatctacgtattagtcatcgctattaccatggtgatgcggttttggcagtacatcaatgggcgtggatagcggtttgactcacggggatttccaagtctccaccccattgacgtcaatgggagtttgttttggaaccaaaatcaacgggactttccaaaatgtcgtaacaactccgccccattgacgcaaatgggcggtaggcgtgtacggtgggaggtctatataagcagagctcgtgagtttggggacccttgattgttctttctttttcgctattgtaaaattcatgttatatggagggggcaaagttttcagggtgttgtttagaatgggaagatgtcccttgtatcaccatggaccctcatgataattttgtttctttcactttctactctgttgacaaccattgtctcctcttattttcttttcattttctgtaactttttcgttaaactttagcttgcatttgtaacgaatttttaaattcacttttgtttatttgtcagattgtaagtactttctctaatcacttttttttcaaggcaatcagggtatattatattgtacttcagcacagttttagagaacaattgttataattaaatgataaggtagaatatttctgcatataaattctggctggcgtggaaatattcttattggtagaaacaactacatcctggtcatcatcctgcctttctctttatggttacaatgatatacactgtttgagatgaggataaaatactctgagtccaaaccgggcccctctgctaaccatgttcatgccttcttctttttcctacagctcctgggcaacgtgctggttattgtgctgtctcatcattttggcaaagaattgtaatacgactcactatagggcgaattgatatgtctagattagataaaagtaaagtgattaacagcgcattagagctgcatgtctagattagataaaagtaaagtgattaacagcgcattagagctgcttaatgaggtcggaatcgaaggtttaacaacccgtaaactcgcccagaagctaggtgtagagcagcctacattgtattggcatgtaaaaaataagcgggctttgctcgacgccttagccattgagatgttagataggcaccatactcacttttgccctttagaaggggaaagctggcaagattttttacgtaataacgctaaaagttttagatgtgctttactaagtcatcgcgatggagcaaaagtacatttaggtacacggcctacagaaaaacagtatgaaactctcgaaaatcaattagcctttttatgccaacaaggtttttcactagagaatgcattatatgcactcagcgctgtggggcattttactttaggttgcgtattggaagatcaagagcatcaagtcgctaaagaagaaagggaaacacctactactgatagtatgccgccattattacgacaagctatcgaattatttgatcaccaaggtgcagagccagccttcttattcggccttgaattgatcatatgcggattagaaaaacaacttaaatgtgaaagtgggtccgcgtacagcggatcccgggaattcagatcttattaaagcagaacttgtttattgcagcttataatggttacaaataaagcaatagcatcacaaatttcacaaataaagcatttttttcactgcattctagttgtggtttgtccaaactcatcaatgtatcttatcatgtctggtcaatgtgtgtcagttagggtgtggaaagtccccaggctccccagcaggcagaagtatgcaaagcatgcatctcaattagtcagcaaccaggtgtggaaagtccccaggctccccagcaggcagaagtatgcaaagcatgcatctcaattagtcagcaaccatagtcccgcccctaactccgcccatcccgcccctaactccgcccagttccgcccattctccgccccatggctgactaattttttttatttatgcagaggccgaggccgcctctgcctctgagctattccagaagtagtgaggaggcttttttggaggcctaggcttttgcaaaaagctccccatagtgactggatatgttgtgttttacagtattatgtagtctgttttttatgcaaaatctaatttaatatattgatatttatatcattttacgtttctcgttcagctttcttgtacaaagtggttgatatccagcacagtggcggccgctcgagtctagagggcccgcggttcgaaggtaagcctatccctaaccctctcctcggtctcgattctacgcgtaccggttagtaatgagtttggaattaattctgtggaatgtgtgtcagttagggtgtggaaagtccccaggctccccagcaggcagaagtatgcaaagcatgcatctcaattagtcagcaaccaggtgtggaaagtccccaggctccccagcaggcagaagtatgcaaagcatgcatctcaattagtcagcaaccatagtcccgcccctaactccgcccatcccgcccctaactccgcccagttccgcccattctccgccccatggctgactaattttttttatttatgcagaggccgaggccgcctctgcctctgagctattccagaagtagtgaggaggcttttttggaggcctaggcttttgcaaaaagctcccgggagcttgtatatccattttcggatctgatcagcacgtgttgacaattaatcatcggcatagtatatcggcatagtataatacgacaaggtgaggaactaaaccatggccaagcctttgtctcaagaagaatccaccctcattgaaagagcaacggctacaatcaacagcatccccatctctgaagactacagcgtcgccagcgcagctctctctagcgacggccgcatcttcactggtgtcaatgtatatcattttactgggggaccttgtgcagaactcgtggtgctgggcactgctgctgctgcggcagctggcaacctgacttgtatcgtcgcgatcggaaatgagaacaggggcatcttgagcccctgcggacggtgccgacaggtgcttctcgatctgcatcctgggatcaaagccatagtgaaggacagtgatggacagccgacggcagttgggattcgtgaattgctgccctctggttatgtgtgggagggctaagcacaattcgagctcggtacctttaagaccaatgacttacaaggcagctgtagatcttagccactttttaaaagaaaaggggggactggaagggctaattcactcccaacgaagacaagatctgctttttgcttgtactgggtctctctggttagaccagatctgagcctgggagctctctggctaactagggaacccactgcttaagcctcaataaagcttgccttgagtgcttcaagtagtgtgtgcccgtctgttgtgtgactctggtaactagagatccctcagacccttttagtcagtgtggaaaatctctagcagtagtagttcatgtcatcttattattcagtatttataacttgcaaagaaatgaatatcagagagtgagaggaacttgtttattgcagcttataatggttacaaataaagcaatagcatcacaaatttcacaaataaagcatttttttcactgcattctagttgtggtttgtccaaactcatcaatgtatcttatcatgtctggctctagctatcccgcccctaactccgcccatcccgcccctaactccgcccagttccgcccattctccgccccatggctgactaattttttttatttatgcagaggccgaggccgcctcggcctctgagctattccagaagtagtgaggaggcttttttggaggcctagggacgtacccaattcgccctatagtgagtcgtattacgcgcgctcactggccgtcgttttacaacgtcgtgactgggaaaaccctggcgttacccaacttaatcgccttgcagcacatccccctttcgccagctggcgtaatagcgaagaggcccgcaccgatcgcccttcccaacagttgcgcagcctgaatggcgaatgggacgcgccctgtagcggcgcattaagcgcggcgggtgtggtggttacgcgcagcgtgaccgctacacttgccagcgccctagcgcccgctcctttcgctttcttcccttcctttctcgccacgttcgccggctttccccgtcaagctctaaatcgggggctccctttagggttccgatttagtgctttacggcacctcgaccccaaaaaacttgattagggtgatggttcacgtagtgggccatcgccctgatagacggtttttcgccctttgacgttggagtccacgttctttaatagtggactcttgttccaaactggaacaacactcaaccctatctcggtctattcttttgatttataagggattttgccgatttcggcctattggttaaaaaatgagctgatttaacaaaaatttaacgcgaattttaacaaaatattaacgcttacaatttaggtggcacttttcggggaaatgtgcgcggaacccctatttgtttatttttctaaatacattcaaatatgtatccgctcatgagacaataaccctgataaatgcttcaataatattgaaaaaggaagagtatgagtattcaacatttccgtgtcgcccttattcccttttttgcggcattttgccttcctgtttttgctcacccagaaacgctggtgaaagtaaaagatgctgaagatcagttgggtgcacgagtgggttacatcgaactggatctcaacagcggtaagatccttgagagttttcgccccgaagaacgttttccaatgatgagcacttttaaagttctgctatgtggcgcggtattatcccgtattgacgccgggcaagagcaactcggtcgccgcatacactattctcagaatgacttggttgagtactcaccagtcacagaaaagcatcttacggatggcatgacagtaagagaattatgcagtgctgccataaccatgagtgataacactgcggccaacttacttctgacaacgatcggaggaccgaaggagctaaccgcttttttgcacaacatgggggatcatgtaactcgccttgatcgttgggaaccggagctgaatgaagccataccaaacgacgagcgtgacaccacgatgcctgtagcaatggcaacaacgttgcgcaaactattaactggcgaactacttactctagcttcccggcaacaattaatagactggatggaggcggataaagttgcaggaccacttctgcgctcggcccttccggctggctggtttattgctgataaatctggagccggtgagcgtgggtctcgcggtatcattgcagcactggggccagatggtaagccctcccgtatcgtagttatctacacgacggggagtcaggcaactatggatgaacgaaatagacagatcgctgagataggtgcctcactgattaagcattggtaactgtcagaccaagtttactcatatatactttagattgatttaaaacttcatttttaatttaaaaggatctaggtgaagatcctttttgataatctcatgaccaaaatcccttaacgtgagttttcgttccactgagcgtcagaccccgtagaaaagatcaaaggatcttcttgagatcctttttttctgcgcgtaatctgctgcttgcaaacaaaaaaaccaccgctaccagcggtggtttgtttgccggatcaagagctaccaactctttttccgaaggtaactggcttcagcagagcgcagataccaaatactgttcttctagtgtagccgtagttaggccaccacttcaagaactctgtagcaccgcctacatacctcgctctgctaatcctgttaccagtggctgctgccagtggcgataagtcgtgtcttaccgggttggactcaagacgatagttaccggataaggcgcagcggtcgggctgaacggggggttcgtgcacacagcccagcttggagcgaacgacctacaccgaactgagatacctacagcgtgagctatgagaaagcgccacgcttcccgaagggagaaaggcggacaggtatccggtaagcggcagggtcggaacaggagagcgcacgagggagcttccagggggaaacgcctggtatctttatagtcctgtcgggtttcgccacctctgacttgagcgtcgatttttgtgatgctcgtcaggggggcggagcctatggaaaaacgccagcaacgcggcctttttacggttcctggccttttgctggccttttgctcacatgttctttcctgcgttatcccctgattctgtggataaccgtattaccgcctttgagtgagctgataccgctcgccgcagccgaacgaccgagcgcagcgagtcagtgagcgaggaagcggaagagcgcccaatacgcaaaccgcctctccccgcgcgttggccgattcattaatgcagctggcacgacaggtttcccgactggaaagcgggcagtgagcgcaacgcaattaatgtgagttagctcactcattaggcaccccaggctttacactttatgcttccggctcgtatgttgtgtggaattgtgagcggataacaatttcacacaggaaacagctatgaccatgattacgccaagcgcgcaattaaccctcactaaagggaacaaaagctggagctgcaagctt

SEQ ID NO: 3 - DNA, 1751 bp, synthetic construct
  source 1..1751: mol_type = other DNA
gtcgaccagtggatcctggaggcttgctgaaggctgtatgctgatcgggtgtaaactgagcttggttttggccactgactgaccaagctcattacacccgatcaggacacaaggcctgttactagcactcacatggaacaaatggcccagatcctggaggcttgctgaaggctgtatgctgataccaggcaggataaggccagttttggccactgactgactggccttactgcctggtatcaggacacaaggcctgttactagcactcacatggaacaaatggcccagatcctggaggcttgctgaaggctgtatgctgtgaccaggatgaccaatccatgttttggccactgactgacatggattgcatcctggtcacaggacacaaggcctgttactagcactcacatggaacaaatggcccagatcctggaggcttgctgaaggctgtatgctgatagcttggtccaacctgttagttttggccactgactgactaacaggtgaccaagctatcaggacacaaggcctgttactagcactcacatggaacaaatggcccagatctccccagtggaaagacgcgcaggcaaaacgcaccacgtgacggagcgtgaccgcgcgccgagcgcgcgccaaggtcgggcaggaagagggcctatttcccatgattccttcatatttgcatatacgatacaaggctgttagagagataattagaattaatttgactgtaaacacaaagatattagtacaaaatacgtgacgtagaaagtaataatttcttgggtagtttgcagttttaaaattatgttttaaaatggactatcatatgcttaccgtaacttgaaagtatttcgatttcttgggtttatatatcttgtggaaaggacggtgctcgcttcggcagcacgtcgtgctagggttcttgggttttctcgcaacagcaggttctgcaatgggcgcggcgtccctgaccgtgtcggctcagtcccggactttactggccgggatagtgcagcaacagcaacagctgttggacgtggtcaagagacaacaagaactgttgcgactgaccgtctggggaacgaaaaacctccaggcaagagtcactgctatagagaagtacctacaggaccaggcgcggctaaattcatggggatgtctagacctagagcggacttcggtccgctttttccccagtggaaagacgcgcaggcaaaacgcaccacgtgacggagcgtgaccgcgcgccgagcgcgcgccaaggtcgggcaggaagagggcctatttcccatgattccttcatatttgcatatacgatacaaggctgttagagagataattagaattaatttgactgtaaacacaaagatattagtacaaaatacgtgacgtagaaagtaataatttcttgggtagtttgcagttttaaaattatgttttaaaatggactatcatatgcttaccgtaacttgaaagtatttcgatttcttgggtttatatatcttgtggaaaggacggtgctcgcttcggcagcacgtcggtcgctctgcggagaggctggcagattgagccctgggaggttctctccagcactagcaggtagagcctgggtgttccctgctagactctcaccagtgcttggccggcactgggcagacggctccacgcttgcttgcttaaagacctcttaataaagctgctctagacctagagcggacttcggtccgcttttttacgtactcgag

SEQ ID NO: 4 - DNA, 64 bp, synthetic construct
  source 1..64: mol_type = other DNA
tgctgataccaggcaggataaggccagttttggccactgactgactggccttactgcctggtat

SEQ ID NO: 5 - DNA, 64 bp, synthetic construct
  source 1..64: mol_type = other DNA
cctgataccaggcagtaaggccagtcagtcagtggccaaaactggccttatcctgcctggtatc

SEQ ID NO: 6 - DNA, 64 bp, synthetic construct
  source 1..64: mol_type = other DNA
tgctgtgaccaggatgaccaatccatgttttggccactgactgacatggattgcatcctggtca

SEQ ID NO: 7 - DNA, 64 bp, synthetic construct
  source 1..64: mol_type = other DNA
cctgtgaccaggatgcaatccatgtcagtcagtggccaaaacatggattggtcatcctggtcac

SEQ ID NO: 8 - DNA, 64 bp, synthetic construct
  source 1..64: mol_type = other DNA
tgctgatcgggtgtaaactgagcttggttttggccactgactgaccaagctcattacacccgat

SEQ ID NO: 9 - DNA, 64 bp, synthetic construct
  source 1..64: mol_type = other DNA
cctgatcgggtgtaatgagcttggtcagtcagtggccaaaaccaagctcagtttacacccgatc

SEQ ID NO: 10 - DNA, 64 bp, synthetic construct
  source 1..64: mol_type = other DNA
tgctgatagcttggtccaacctgttagttttggccactgactgactaacaggtgaccaagctat

SEQ ID NO: 11 - DNA, 64 bp, synthetic construct
  source 1..64: mol_type = other DNA
cctgatagcttggtcacctgttagtcagtcagtggccaaaactaacaggttggaccaagctatc

SEQ ID NO: 12 - DNA, 160 bp, synthetic construct
  source 1..160: mol_type = other DNA
gtcgctctgcggagaggctggcagattgagccctgggaggttctctccagcactagcaggtagagcctgggtgttccctgctagactctcaccagtgcttggccggcactgggcagacggctccacgcttgcttgcttaaagacctcttaataaagctgc

SEQ ID NO: 13 - DNA, 247 bp, synthetic construct
  source 1..247: mol_type = other DNA
tgctagggttcttgggttttctcgcaacagcaggttctgcaatgggcgcggcgtccctgaccgtgtcggctcagtcccggactttactggccgggatagtgcagcaacagcaacagctgttggacgtggtcaagagacaacaagaactgttgcgactgaccgtctggggaacgaaaaacctccaggcaagagtcactgctatagagaagtacctacaggaccaggcgcggctaaattcatggggatg

SEQ ID NO: 14 - RNA, 24 nt, synthetic construct
  source 1..24: mol_type = other RNA
gtgctcgctcggcagcacgtcgac

SEQ ID NO: 15 - RNA, 26 nt, synthetic construct
  source 1..26: mol_type = other RNA
tctagagcggacttcggtccgctttt

SEQ ID NO: 16 - DNA, 25 bp, synthetic construct
  source 1..25: mol_type = other DNA
gtgctcgcttcggcagcacgtcgac

SEQ ID NO: 17 - RNA, 26 nt, synthetic construct
  source 1..26: mol_type = other RNA
tctagagcggacttcggtccgctttt

SEQ ID NO: 18 - DNA, 606 bp, Homo sapiens
  source 1..606: mol_type = genomic DNA
atgagccggagggagggaagtctggaagacccccagactgattcctcagtctcacttcttccccacttggaggccaagatccgtcagacacacagccttgcgcacctcctcaccaaatacgctgagcagctgctccaggaatatgtgcagctccagggagaccccttcgggctgcccagcttctcgccgccgcggctgccggtggccggcctgagcgccccggctccgagccacgcggggctgccagtgcacgagcggctgcggctggacgcggcggcgctggccgcgctgcccccgctgctggacgcagtgtgtcgccgccaggccgagctgaacccgcgcgcgccgcgcctgctgcgccgcctggaggacgcggcgcgccaggcccgggccctgggcgccgccgtggaggccttgctggccgcgctgggcgccgccaaccgcgggccccgggccgagccccccgccgccaccgcctcagccgcctccgccaccggggtcttccccgccaaggtgctggggctccgcgtttgcggcctctaccgcgagtggctgagccgcaccgagggcgacctgggccagctgctgcccgggggctcggcctga

SEQ ID NO: 19 - DNA, 603 bp, Homo sapiens
  source 1..603: mol_type = genomic DNA
atggctttcacagagcattcaccgctgacccctcaccgtcgggacctctgtagccgctctatctggctagcaaggaagattcgttcagacctgactgctcttacggaatcctatgtgaagcatcagggcctgaacaagaacatcaacctggactctgcggatgggatgccagtggcaagcactgatcagtggagtgagctgaccgaggcagagcgactccaagagaaccttcaagcttatcgtaccttccatgttttgttggccaggctcttagaagaccagcaggtgcattttaccccaaccgaaggtgacttccatcaagctatacatacccttcttctccaagtcgctgcctttgcataccagatagaggagttaatgatactcctggaatacaagatcccccgcaatgaggctgatgggatgcctattaatgttggagatggtggtctctttgagaagaagctgtggggcctaaaggtgctgcaggagctttcacagtggacagtaaggtccatccatgaccttcgtttcatttcttctcatcagactgggatcccagcacgtgggagccattatattgctaacaacaagaaaatgtag

SEQ ID NO: 20 - DNA, 990 bp, Homo sapiens
  source 1..990: mol_type = genomic DNA
atgttgacgttgcagacttggctagtgcaagccttgtttattttcctcaccactgaatctacaggtgaacttctagatccatgtggttatatcagtcctgaatctccagttgtacaacttcattctaatttcactgcagtttgtgtgctaaaggaaaaatgtatggattattttcatgtaaatgctaattacattgtctggaaaacaaaccattttactattcctaaggagcaatatactatcataaacagaacagcatccagtgtcacctttacagatatagcttcattaaatattcagctcacttgcaacattcttacattcggacagcttgaacagaatgtttatggaatcacaataatttcaggcttgcctccagaaaaacctaaaaatttgagttgcattgtgaacgaggggaagaaaatgaggtgtgagtgggatggtggaagggaaacacacttggagacaaacttcactttaaaatctgaatgggcaacacacaagtttgctgattgcaaagcaaaacgtgacacccccacctcatgcactgttgattattctactgtgtattttgtcaacattgaagtctgggtagaagcagagaatgcccttgggaaggttacatcagatcatatcaattttgatcctgtatataaagtgaagcccaatccgccacataatttatcagtgatcaactcagaggaactgtctagtatcttaaaattgacatggaccaacccaagtattaagagtgttataatactaaaatataacattcaatataggaccaaagatgcctcaacttggagccagattcctcctgaagacacagcatccacccgatcttcattcactgtccaagaccttaaaccttttacagaatatgtgtttaggattcgctgtatgaaggaagatggtaagggatactggagtgactggagtgaagaagcaagtgggatcacctatgaagataacattgcctccttttga

SEQ ID NO: 21 - DNA, 639 bp, Homo sapiens
  source 1..639: mol_type = genomic DNA
atgaactccttctccacaagcgccttcggtccagttgccttctccctggggctgctcctggtgttgcctgctgccttccctgccccagtacccccaggagaagattccaaagatgtagccgccccacacagacagccactcacctcttcagaacgaattgacaaacaaattcggtacatcctcgacggcatctcagccctgagaaaggagacatgtaacaagagtaacatgtgtgaaagcagcaaagaggcactggcagaaaacaacctgaaccttccaaagatggctgaaaaagatggatgcttccaatctggattcaatgaggagacttgcctggtgaaaatcatcactggtcttttggagtttgaggtatacctagagtacctccagaacagatttgagagtagtgaggaacaagccagagctgtgcagatgagtacaaaagtcctgatccagttcctgcagaaaaaggcaaagaatctagatgcaataaccacccctgacccaaccacaaatgccagcctgctgacgaagctgcaggcacagaaccagtggctgcaggacatgacaactcatctcattctgcgcagctttaaggagttcctgcagtccagcctgagggctcttcggcaaatgtag

SEQ ID NO: 22 - DNA, 756 bp, Homo sapiens
  source 1..756: mol_type = genomic DNA
atggctatgagttcttttttgatcaactcaaactatgtcgaccccaagttccctccatgcgaggaatattcacagagcgattacctacccagcgaccactcgcccgggtactacgccggcggccagaggcgagagagcagcttccagccggaggcgggcttcgggcggcgcgcggcgtgcaccgtgcagcgctacgcggcctgccgggaccctgggcccccgccgcctccgccaccacccccgccgcccccgccaccgcccggtctgtcccctcgggctcctgcgccgccacccgccggggccctcctcccggagcccggccagcgctgcgaggcggtcagcagcagccccccgccgcctccctgcgcccagaaccccctgcaccccagcccgtcccactccgcgtgcaaagagcccgtcgtctacccctggatgcgcaaagttcacgtgagcacggtaaaccccaattacgccggcggggagcccaagcgctctcggaccgcctacacgcgccagcaggtcttggagctggagaaggaatttcactacaaccgctacctgacacggcgccggagggtggagatcgcccacgcgctctgcctctccgagcgccagatcaagatctggttccagaaccggcgcatgaagtggaaaaaagaccacaagttgcccaacaccaagatccgctcgggtggtgcggcaggctcagccggagggccccctggccggcccaatggaggcccccgcgcgctctag

SEQ ID NO: 23 - DNA, 1407 bp, Homo sapiens
  source 1..1407: mol_type = genomic DNA
atgctggccgtcggctgcgcgctgctggctgccctgctggccgcgccgggagcggcgctggccccaaggcgctgccctgcgcaggaggtggcgagaggcgtgctgaccagtctgccaggagacagcgtgactctgacctgcccgggggtagagccggaagacaatgccactgttcactgggtgctcaggaagccggctgcaggctcccaccccagcagatgggctggcatgggaaggaggctgctgctgaggtcggtgcagctccacgactctggaaactattcatgctaccgggccggccgcccagctgggactgtgcacttgctggtggatgttccccccgaggagccccagctctcctgcttccggaagagccccctcagcaatgttgtttgtgagtggggtcctcggagcaccccatccctgacgacaaaggctgtgctcttggtgaggaagtttcagaacagtccggccgaagacttccaggagccgtgccagtattcccaggagtcccagaagttctcctgccagttagcagtcccggagggagacagctctttctacatagtgtccatgtgcgtcgccagtagtgtcgggagcaagttcagcaaaactcaaacctttcagggttgtggaatcttgcagcctgatccgcctgccaacatcacagtcactgccgtggccagaaacccccgctggctcagtgtcacctggcaagacccccactcctggaactcatctttctacagactacggtttgagctcagatatcgggctgaacggtcaaagacattcacaacatggatggtcaaggacctccagcatcactgtgtcatccacgacgcctggagcggcctgaggcacgtggtgcagcttcgtgcccaggaggagttcgggcaaggcgagtggagcgagtggagcccggaggccatgggcacgccttggacagaatccaggagtcctccagctgagaacgaggtgtccacccccatgcaggcacttactactaataaagacgatgataatattctcttcagagattctgcaaatgcgacaagcctcccagtgcaagattcttcttcagtaccactgcccacattcctggttgctggagggagcctggccttcggaacgctcctctgcattgccattgttctgaggttcaagaagacgtggaagctgcgggctctgaaggaaggcaagacaagcatgcatccgccgtactctttggggcagctggtcccggagaggcctcgacccaccccagtgcttgttcctctcatctccccaccggtgtcccccagcagcctggggtctgacaatacctcgagccacaaccgaccagatgccagggacccacggagcccttatgacatcagcaatacagactacttcttccccagatag

SEQ ID NO: 24 - DNA, 600 bp, Rattus norvegicus
  source 1..600: mol_type = genomic DNA
atgaactgtgtttgtcgcctggtcctggtggtgctgagcctctggccagatagagtcgttgcccctgggccaccagctggctcccctcgagtgtcttcagaccctcgtgcagatctggatagcgctgtcctcttgaccaggtccctcctggcagacacacggcaactagctgcacagatgagagacaaattcccagctgatggagaccacaatctggactccctacctaccttggccatgagcgctgggacactgggatctttgcagcttcctggagtgctgacaaggcttcgagtagacttaatgtcctacttccgacatgtacagtggttgcgccgggcagctggtccttccctaaagactctggagccagagctgggtgccctgcaagcccgactggaacggctacttcgtcgcttacagctcttgatgtctcgcctagccttgccccaggcagccccggaccaacctgcggtccctctgggccctcctgcctcggcctggggaagcatccgggcagctcatgccatcctaggagggctgcacctgaccttggactgggccgtgcggggcctgctgttgttaaagactcggctgtaa

SEQ ID NO: 25 - DNA, 609 bp, Homo sapiens
  source 1..609: mol_type = genomic DNA
atgaaggtcttggcggcaggagttgtgcccctgctgttggttctgcactggaaacatggggcggggagccccctccccatcacccctgtcaacgccacctgtgccatacgccacccatgtcacaacaacctcatgaaccagatcaggagccaactggcacagctcaatggcagtgccaatgccctctttattctctattacacagcccagggggagccgttccccaacaacctggacaagctatgtggccccaacgtgacggacttcccgcccttccacgccaacggcacggagaaggccaagctggtggagctgtaccgcatagtcgtgtaccttggcacctccctgggcaacatcacccgggaccagaagatcctcaaccccagtgccctcagcctccacagcaagctcaacgccaccgccgacatcctgcgaggcctccttagcaacgtgctgtgccgcctgtgcagcaagtaccacgtgggccatgtggacgtgacctacggccctgacacctcgggtaaggatgtcttccagaagaagaagctgggctgtcaactcctggggaagtataagcagatcatcgccgtgttggcccaggccttctag

SEQ ID NO: 26 - DNA, 3294 bp, Homo sapiens
  source 1..3294: mol_type = genomic DNA
atgatggatatttacgtatgtttgaaacgaccatcctggatggtggacaataaaagaatgaggactgcttcaaatttccagtggctgttatcaacatttattcttctatatctaatgaatcaagtaaatagccagaaaaagggggctcctcatgatttgaagtgtgtaactaacaatttgcaagtgtggaactgttcttggaaagcaccctctggaacaggccgtggtactgattatgaagtttgcattgaaaacaggtcccgttcttgttatcagttggagaaaaccagtattaaaattccagctctttcacatggtgattatgaaataacaataaattctctacatgattttggaagttctacaagtaaattcacactaaatgaacaaaacgtttccttaattccagatactccagagatcttgaatttgtctgctgatttctcaacctctacattatacctaaagtggaacgacaggggttcagtttttccacaccgctcaaatgttatctgggaaattaaagttctacgtaaagagagtatggagctcgtaaaattagtgacccacaacacaactctgaatggcaaagatacacttcatcactggagttgggcctcagatatgcccttggaatgtgccattcattttgtggaaattagatgctacattgacaatcttcatttttctggtctcgaagagtggagtgactggagccctgtgaagaacatttcttggatacctgattctcagactaaggtttttcctcaagataaagtgatacttgtaggctcagacataacattttgttgtgtgagtcaagaaaaagtgttatcagcactgattggccatacaaactgccccttgatccatcttgatggggaaaatgttgcaatcaagattcgtaatatttctgtttctgcaagtagtggaacaaatgtagtttttacaaccgaagataacatatttggaaccgttatttttgctggatatccaccagatactcctcaacaactgaattgtgagacacatgatttaaaagaaattatatgtagttggaatccaggaagggtgacagcgttggtgggcccacgtgctacaagctacactttagttgaaagtttttcaggaaaatatgttagacttaaaagagctgaagcacctacaaacgaaagctatcaattattatttcaaatgcttccaaatcaagaaatatataattttactttgaatgctcacaatccgctgggtcgatcacaatcaacaattttagttaatataactgaaaaagtttatccccatactcctacttcattcaaagtgaaggatattaattcaacagctgttaaactttcttggcatttaccaggcaactttgcaaagattaattttttatgtgaaattgaaattaagaaatctaattcagtacaagagcagcggaatgtcacaatcaaaggagtagaaaattcaagttatcttgttgctctggacaagttaaatccatacactctatatacttttcggattcgttgttctactgaaactttctggaaatggagcaaatggagcaataaaaaacaacatttaacaacagaagccagtccttcaaaggggcctgatacttggagagagtggagttctgatggaaaaaatttaataatctattggaagcctttacccattaatgaagctaatggaaaaatactttcctacaatgtatcgtgttcatcagatgaggaaacacagtccctttctgaaatccctgatcctcagcacaaagcagagatacgacttgataagaatgactacatcatcagcgtagtggctaaaaattctgtgggctcatcaccaccttccaaaatagcgagtatggaaattccaaatgatgatctcaaaatagaacaagttgttgggatgggaaaggggattctcctcacctggcattacgaccccaacatgacttgcgactacgtcattaagtggtgtaactcgtctcggtcggaaccatgccttatggactggagaaaagttccctcaaacagcactgaaactgtaatagaatctgatgagtttcgaccaggtataagatataattttttcctgtatggatgcagaaatcaaggatatcaattattacgctccatgattggatatatagaagaattggctcccattgttgcaccaaattttactgttgaggatacttctgcagattcgatattagtaaaatgggaagacattcctgtggaagaacttagaggctttttaagaggatatttgttttactttggaaaaggagaaagagacacatctaagatgagggttttagaatcaggtcgttctgacataaaagttaagaatattactgacatatcccagaagacactgagaattgctgatcttcaaggtaaaacaagttaccacctggtcttgcgagcctatacagatggtggagtgggcccggagaagagtatgtatgtggtgacaaaggaaaattctgtgggattaattattgccattctcatcccagtggcagtggctgtcattgttggagtggtgacaagtatcctttgctatcggaaacgagaatggattaaagaaaccttctaccctgatattccaaatccagaaaactgtaaagcattacagtttcaaaagagtgtctgtgagggaagcagtgctcttaaaacattggaaatgaatccttgtaccccaaataatgttgaggttctggaaactcgatcagcatttcctaaaatagaagatacagaaataatttccccagtagctgagcgtcctgaagatcgctctgatgcagagcctgaaaaccatgtggttgtgtcctattgtccacccatcattgaggaagaaataccaaacccagccgcagatgaagctggagggactgcacaggttatttacattgatgttcagtcgatgtatcagcctcaagcaaaaccagaagaagaacaagaaaatgaccctgtaggaggggcaggctataagccacagatgcacctccccattaattctactgtggaagatatagctgcagaagaggacttagataaaactgcgggttacagacctcaggccaatgtaaatacatggaatttagtgtctccagactctcctagatccatagacagcaacagtgagattgtctcatttggaagtccatgctccattaattcccgacaatttttgattcctcctaaagatgaagactctcctaaatctaatggaggagggtggtcctttacaaacttttttcagaacaaaccaaacgattaa

SEQ ID NO: 27 - DNA, 2310 bp, Homo sapiens
  source 1..2310: mol_type = genomic DNA
atggcccaatggaatcagctacagcagcttgacacacggtacctggagcagctccatcagctctacagtgacagcttcccaatggagctgcggcagtttctggccccttggattgagagtcaagattgggcatatgcggccagcaaagaatcacatgccactttggtgtttcataatctcctgggagagattgaccagcagtatagccgcttcctgcaagagtcgaatgttctctatcagcacaatctacgaagaatcaagcagtttcttcagagcaggtatcttgagaagccaatggagattgcccggattgtggcccggtgcctgtgggaagaatcacgccttctacagactgcagccactgcggcccagcaagggggccaggccaaccaccccacagcagccgtggtgacggagaagcagcagatgctggagcagcaccttcaggatgtccggaagagagtgcaggatctagaacagaaaatgaaagtggtagagaatctccaggatgactttgatttcaactataaaaccctcaagagtcaaggagacatgcaagatctgaatggaaacaaccagtcagtgaccaggcagaagatgcagcagctggaacagatgctcactgcgctggaccagatgcggagaagcatcgtgagtgagctggcggggcttttgtcagcgatggagtacgtgcagaaaactctcacggacgaggagctggctgactggaagaggcggcaacagattgcctgcattggaggcccgcccaacatctgcctagatcggctagaaaactggataacgtcattagcagaatctcaacttcagacccgtcaacaaattaagaaactggaggagttgcagcaaaaagtttcctacaaaggggaccccattgtacagcaccggccgatgctggaggagagaatcgtggagctgtttagaaacttaatgaaaagtgcctttgtggtggagcggcagccctgcatgcccatgcatcctgaccggcccctcgtcatcaagaccggcgtccagttcactactaaagtcaggttgctggtcaaattccctgagttgaattatcagcttaaaattaaagtgtgcattgacaaagactctggggacgttgcagctctcagaggatcccggaaatttaacattctgggcacaaacacaaaagtgatgaacatggaagaatccaacaacggcagcctctctgcagaattcaaacacttgaccctgagggagcagagatgtgggaatgggggccgagccaattgtgatgcttccctgattgtgactgaggagctgcacctgatcacctttgagaccgaggtgtatcaccaaggcctcaagattgacctagagacccactccttgccagttgtggtgatctccaacatctgtcagatgccaaatgcctgggcgtccatcctgtggtacaacatgctgaccaacaatcccaagaatgtaaacttttttaccaagcccccaattggaacctgggatcaagtggccgaggtcctgagctggcagttctcctccaccaccaagcgaggactgagcatcgagcagctgactacactggcagagaaactcttgggacctggtgtgaattattcagggtgtcagatcacatgggctaaattttgcaaagaaaacatggctggcaagggcttctccttctgggtctggctggacaatatcattgaccttgtgaaaaagtacatcctggccctttggaacgaagggtacatcatgggctttatcagtaaggagcgggagcgggccatcttgagcactaagcctccaggcaccttcctgctaagattcagtgaaagcagcaaagaaggaggcgtcactttcacttgggtggagaaggacatcagcggtaagacccagatccagtccgtggaaccatacacaaagcagcagctgaacaacatgtcatttgctgaaatcatcatgggctataagatcatggatgctaccaatatcctggtgtctccactggtctatctctatcctgacattcccaaggaggaggcattcggaaagtattgtcggccagagagccaggagcatcctgaagctgacccaggcgctgccccatacctgaagaccaagtttatctgtgtgacaccaacgacctgcagcaataccattgacctgccgatgtccccccgcactttagattcattgatgcagtttggaaataatggtgaaggtgctgaaccctcagcaggagggcagtttgagtccctcacctttgacatggagttgacctcggagtgcgctacctcccccatgtga

SEQ ID NO: 28 - DNA, 1956 bp, Homo sapiens
  source 1..1956: mol_type = genomic DNA
atgaacaaattacggcaaagttttaggagaaagaaggatgtttatgttccagaggccagtcgtccacatcagtggcagacagatgaagaaggcgttcgcaccggaaaatgtagcttcccggttaagtaccttggccatgtagaagttgatgaatcaagaggaatgcacatctgtgaagatgctgtaaaaagattgaaagctgaaaggaagttcttcaaaggcttctttggaaaaactggaaagaaagcagttaaagcagttctgtgggtctcagcagatggactcagagttgtggatgaaaaaactaaggacctcatagttgaccagacgatagagaaagtttctttctgtgccccagacaggaactttgatagagccttttcttacatatgccgtgatggcaccactcgtcgctggatctgtcactgcttcatggctgtcaaggacacaggtgaaaggttgagccatgcagtaggctgtgcttttgcagcctgtttagagcgcaagcagaagcgggagaaggaatgtggagtgactgctacttttgatgctagtcggaccacttttacaagagaaggatcattccgtgtcacaacagccactgaacaagcagaaagagaggagatcatgaaacaaatgcaagatgccaagaaagctgaaacagataagatagtcgttggttcatcagttgcccctggcaacactgccccatccccatcctctcccacctctcctacttctgatgccacgacctctctggagatgaacaatcctcatgccatcccacgccggcatgctccaattgaacagcttgctcgccaaggctctttccgaggttttcctgctcttagccagaagatgtcaccctttaaacgccaactatccctacgcatcaatgagttgccttccactatgcagaggaagactgatttccccattaaaaatgcagtgccagaagtagaaggggaggcagagagcatcagctccctgtgctcacagatcaccaatgccttcagcacacctgaggaccccttctcatctgctccgatgaccaaaccagtgacagtggtggcaccacaatctcctaccttccaagctaatggcactgactcagccttccatgtgcttgctaagccagcccatactgctctagcacccgtagcaatgcctgtgcgtgaaaccaacccttgggcccatgcccctgatgctgctaacaaggaaattgcagccacatgttcggggaccgagtggggtcaatcttctggtgctgcctctccaggtctcttccaggccggtcatagacgtactccctctgaggccgaccgatggttagaagaggtgtctaagagcgtccgggctcagcagccccaggcctcagctgctcctctgcagccagttctccagcctcctccacccactgccatctcccagccagcatcacctttccaagggaatgcattcctcacctctcagcctgtgccagtgggtgtggtcccagccctgcaaccagcctttgtccctgcccagtcctatcctgtggccaatggaatgccctatccagcccctaatgtgcctgtggtgggcatcactccctcccagatggtggccaacgtatttggcactgcaggccaccctcaggctgcccatccccatcagtcacccagcctggtcaggcagcagacattccctcactacgaggcaagcagtgctaccaccagtcccttctttaagcctcctgctcagcacctcaacggttctgcagctttcaatggtgtagatgatggcaggttggcctcagcagacaggcatacagaggttcctacaggcacctgcccagtggatccttttgaagcccagtgggctgcattagaaaataagtccaagcagcgtactaatccctcccctaccaaccctttctccagtgacttacagaagacgtttgaaattgaactttaa

SEQ ID NO: 29 - DNA, 1812 bp, Homo sapiens
  source 1..1812: mol_type = genomic DNA
atgaacaaattacggcaaagttttaggagaaagaaggatgtttatgttccagaggccagtcgtccacatcagtggcagacagatgaagaaggcgttcgcaccggaaaatgtagcttcccggttaagtaccttggccatgtagaagttgatgaatcaagaggaatgcacatctgtgaagatgctgtaaaaagattgaaagctgaaaggaagttcttcaaaggcttctttggaaaaactggaaagaaagcagttaaagcagttctgtgggtctcagcagatggactcagagttgtggatgaaaaaactaaggacctcatagttgaccagacgatagagaaagtttctttctgtgccccagacaggaactttgatagagccttttcttacatatgccgtgatggcaccactcgtcgctggatctgtcactgcttcatggctgtcaaggacacaggtgaaaggttgagccatgcagtaggctgtgcttttgcagcctgtttagagcgcaagcagaagcgggagaaggaatgtggagtgactgctacttttgatgctagtcggaccacttttacaagagaaggatcattccgtgtcacaacagccactgaacaagcagaaagagaggagatcatgaaacaaatgcaagatgccaagaaagctgaaacagataagatagtcgttggttcatcagttgcccctggcaacactgccccatccccatcctctcccacctctcctacttctgatgccacgacctctctggagatgaacaatcctcatgccatcccacgccggcatgctccaattgaacagcttgctcgccaaggctctttccgaggttttcctgctcttagccagaagatgtcaccctttaaacgccaactatccctacgcatcaatgagttgccttccactatgcagaggaagactgatttccccattaaaaatgcagtgccagaagtagaaggggaggcagagagcatcagctccctgtgctcacagatcaccaatgccttcagcacacctgaggaccccttctcatctgctccgatgaccaaaccagtgacagtggtggcaccacaatctcctaccttccaagggaccgagtggggtcaatcttctggtgctgcctctccaggtctcttccaggccggtcatagacgtactccctctgaggccgaccgatggttagaagaggtgtctaagagcgtccgggctcagcagccccaggcctcagctgctcctctgcagccagttctccagcctcctccacccactgccatctcccagccagcatcacctttccaagggaatgcattcctcacctctcagcctgtgccagtgggtgtggtcccagccctgcaaccagcctttgtccctgcccagtcctatcctgtggccaatggaatgccctatccagcccctaatgtgcctgtggtgggcatcactccctcccagatggtggccaacgtatttggcactgcaggccaccctcaggctgcccatccccatcagtcacccagcctggtcaggcagcagacattccctcactacgaggcaagcagtgctaccaccagtcccttctttaagcctcctgctcagcacctcaacggttctgcagctttcaatggtgtagatgatggcaggttggcctcagcagacaggcatacagaggttcctacaggcacctgcccagtggatccttttgaagcccagtgggctgcattagaaaataagtccaagcagcgtactaatccctcccctaccaaccctttctccagtgacttacagaagacgtttgaaattgaactttaa

SEQ ID NO: 30 - DNA, 1923 bp, Homo sapiens
  source 1..1923: mol_type = genomic DNA
atgaacaaattacggcaaagttttaggagaaagaaggatgtttatgttccagaggccagtcgtccacatcagtggcagacagatgaagaaggcgttcgcaccggaaaatgtagcttcccggttaagtaccttggccatgtagaagttgatgaatcaagaggaatgcacatctgtgaagatgctgtaaaaagattgaaagctactggaaagaaagcagttaaagcagttctgtgggtctcagcagatggactcagagttgtggatgaaaaaactaaggacctcatagttgaccagacgatagagaaagtttctttctgtgccccagacaggaactttgatagagccttttcttacatatgccgtgatggcaccactcgtcgctggatctgtcactgcttcatggctgtcaaggacacaggtgaaaggttgagccatgcagtaggctgtgcttttgcagcctgtttagagcgcaagcagaagcgggagaaggaatgtggagtgactgctacttttgatgctagtcggaccacttttacaagagaaggatcattccgtgtcacaacagccactgaacaagcagaaagagaggagatcatgaaacaaatgcaagatgccaagaaagctgaaacagataagatagtcgttggttcatcagttgcccctggcaacactgccccatccccatcctctcccacctctcctacttctgatgccacgacctctctggagatgaacaatcctcatgccatcccacgccggcatgctccaattgaacagcttgctcgccaaggctctttccgaggttttcctgctcttagccagaagatgtcaccctttaaacgccaactatccctacgcatcaatgagttgccttccactatgcagaggaagactgatttccccattaaaaatgcagtgccagaagtagaaggggaggcagagagcatcagctccctgtgctcacagatcaccaatgccttcagcacacctgaggaccccttctcatctgctccgatgaccaaaccagtgacagtggtggcaccacaatctcctaccttccaagctaatggcactgactcagccttccatgtgcttgctaagccagcccatactgctctagcacccgtagcaatgcctgtgcgtgaaaccaacccttgggcccatgcccctgatgctgctaacaaggaaattgcagccacatgttcggggaccgagtggggtcaatcttctggtgctgcctctccaggtctcttccaggccggtcatagacgtactccctctgaggccgaccgatggttagaagaggtgtctaagagcgtccgggctcagcagccccaggcctcagctgctcctctgcagccagttctccagcctcctccacccactgccatctcccagccagcatcacctttccaagggaatgcattcctcacctctcagcctgtgccagtgggtgtggtcccagccctgcaaccagcctttgtccctgcccagtcctatcctgtggccaatggaatgccctatccagcccctaatgtgcctgtggtgggcatcactccctcccagatggtggccaacgtatttggcactgcaggccaccctcaggctgcccatccccatcagtcacccagcctggtcaggcagcagacattccctcactacgaggcaagcagtgctaccaccagtcccttctttaagcctcctgctcagcacctcaacggttctgcagctttcaatggtgtagatgatggcaggttggcctcagcagacaggcatacagaggttcctacaggcacctgcccagtggatccttttgaagcccagtgggctgcattagaaaataagtccaagcagcgtactaatccctcccctaccaaccctttctccagtgacttacagaagacgtttgaaattgaactttaa

SEQ ID NO: 31 - DNA, 1779 bp, Homo sapiens
  source 1..1779: mol_type = genomic DNA
atgaacaaattacggcaaagttttaggagaaagaaggatgtttatgttccagaggccagtcgtccacatcagtggcagacagatgaagaaggcgttcgcaccggaaaatgtagcttcccggttaagtaccttggccatgtagaagttgatgaatcaagaggaatgcacatctgtgaagatgctgtaaaaagattgaaagctactggaaagaaagcagttaaagcagttctgtgggtctcagcagatggactcagagttgtggatgaaaaaactaaggacctcatagttgaccagacgatagagaaagtttctttctgtgccccagacaggaactttgatagagccttttcttacatatgccgtgatggcaccactcgtcgctggatctgtcactgcttcatggctgtcaaggacacaggtgaaaggttgagccatgcagtaggctgtgcttttgcagcctgtttagagcgcaagcagaagcgggagaaggaatgtggagtgactgctacttttgatgctagtcggaccacttttacaagagaaggatcattccgtgtcacaacagccactgaacaagcagaaagagaggagatcatgaaacaaatgcaagatgccaagaaagctgaaacagataagatagtcgttggttcatcagttgcccctggcaacactgccccatccccatcctctcccacctctcctacttctgatgccacgacctctctggagatgaacaatcctcatgccatcccacgccggcatgctccaattgaacagcttgctcgccaaggctctttccgaggttttcctgctcttagccagaagatgtcaccctttaaacgccaactatccctacgcatcaatgagttgccttccactatgcagaggaagactgatttccccattaaaaatgcagtgccagaagtagaaggggaggcagagagcatcagctccctgtgctcacagatcaccaatgccttcagcacacctgaggaccccttctcatctgctccgatgaccaaaccagtgacagtggtggcaccacaatctcctaccttccaagggaccgagtggggtcaatcttctggtgctgcctctccaggtctcttccaggccggtcatagacgtactccctctgaggccgaccgatggttagaagaggtgtctaagagcgtccgggctcagcagccccaggcctcagctgctcctctgcagccagttctccagcctcctccacccactgccatctcccagccagcatcacctttccaagggaatgcattcctcacctctcagcctgtgccagtgggtgtggtcccagccctgcaaccagcctttgtccctgcccagtcctatcctgtggccaatggaatgccctatccagcccctaatgtgcctgtggtgggcatcactccctcccagatggtggccaacgtatttggcactgcaggccaccctcaggctgcccatccccatcagtcacccagcctggtcaggcagcagacattccctcactacgaggcaagcagtgctaccaccagtcccttctttaagcctcctgctcagcacctcaacggttctgcagctttcaatggtgtagatgatggcaggttggcctcagcagacaggcatacagaggttcctacaggcacctgcccagtggatccttttgaagcccagtgggctgcattagaaaataagtccaagcagcgtactaatccctcccctaccaaccctttctccagtgacttacagaagacgtttgaaattgaactttaa

SEQ ID NO: 32 - DNA, 1830 bp, Mus musculus
  source 1..1830: mol_type = genomic DNA
atgtcccgcagcgcggcggccagcggcggaccccggaggcctgagcggcacctgcccccagccccctgtggggccccggggcccccagaaacctgcaggacggagccagacggggcgggcaccatgaacaagttacggcagagcctgcggcggaggaagccagcctacgtgcccgaggcgtcgcgcccgcaccagtggcaggcagacgaggacgcggtgcggaagggcacgtgcagcttcccggtcaggtacctgggtcacgtggaggtagaggagtcccggggaatgcacgtgtgtgaagatgcggtgaagaagctgaaggcgatgggccgaaagtccgtgaagtctgtcctgtgggtgtcagccgatgggctccgagtggtggacgacaaaaccaaggatcttctggtcgaccagaccatcgaaaaggtctccttttgtgctcctgaccgcaacctggacaaggctttctcctatatctgtcgtgacgggactacccgccgctggatctgccactgttttctggcactgaaggactccggcgagaggctgagccacgctgtgggctgtgcttttgccgcctgcctggagcgaaaacagcgacgggagaaggaatgtggggtcacggccgccttcgatgccagccgcaccagcttcgcccgcgagggctccttccgcctgtctgggggtgggcggcctgctgagcgagaggccccggacaagaagaaagcagaggcagcagctgcccccactgtggctcctggccctgcccagcctgggcacgtgtccccgacaccagccaccacatcccctggtgagaagggtgaggcaggcacccctgtggctgcaggcaccactgcggccgccatcccccggcgccatgcacccctggagcagctggttcgccagggctccttccgtgggttcccagcactcagccagaagaactcgcctttcaaacggcagctgagcctacggctgaatgagctgccatccacgctgcagcgccgcactgacttccaggtgaagggcacagtgcctgagatggagcctcctggtgccggcgacagtgacagcatcaacgctctgtgcacacagatcagttcatcttttgccagtgctggagcgccagcaccagggccaccacctgccacaacagggacttctgcctggggtgagccctccgtgccccctgcagctgccttccagcctgggcacaagcggacaccttcagaggctgagcgatggctggaggaggtgtcacaggtggccaaggcccagcagcagcagcagcagcaacagcaacagcagcagcagcagcagcagcaacagcagcaagcagcctcagtggccccagtgcccaccatgcctcctgccctgcagcctttccccgcccccgtggggccctttgacgctgcacctgcccaagtggccgtgttcctgccacccccacacatgcagcccccttttgtgcccgcctacccgggcttgggctacccaccgatgccccgggtgcccgtggtgggcatcacaccctcacagatggtggcaaacgccttctgctcagccgcccagctccagcctcagcctgccactctgcttgggaaagctggggccttcccgccccctgccatacccagtgcccctgggagccaggcccgccctcgccccaatggggccccctggccccctgagccagcgcctgccccagctccagagttggacccctttgaggcccagtgggcggcattagaaggcaaagccactgtagagaaaccctccaaccccttttctggcgacctgcaaaagacattcgagattgaactgtag

SEQ ID NO: 33 - DNA, 918 bp, Homo sapiens
  source 1..918: mol_type = genomic DNA
atgagtgtggatccagcttgtccccaaagcttgccttgctttgaagcatccgactgtaaagaatcttcacctatgcctgtgatttgtgggcctgaagaaaactatccatccttgcaaatgtcttctgctgagatgcctcacacggagactgtctctcctcttccttcctccatggatctgcttattcaggacagccctgattcttccaccagtcccaaaggcaaacaacccacttctgcagagaagagtgtcgcaaaaaaggaagacaaggtcccggtcaagaaacagaagaccagaactgtgttctcttccacccagctgtgtgtactcaatgatagatttcagagacagaaatacctcagcctccagcagatgcaagaactctccaacatcctgaacctcagctacaaacaggtgaagacctggttccagaaccagagaatgaaatctaagaggtggcagaaaaacaactggccgaagaatagcaatggtgtgacgcagaaggcctcagcacctacctaccccagcctttactcttcctaccaccagggatgcctggtgaacccgactgggaaccttccaatgtggagcaaccagacctggaacaattcaacctggagcaaccagacccagaacatccagtcctggagcaaccactcctggaacactcagacctggtgcacccaatcctggaacaatcaggcctggaacagtcccttctataactgtggagaggaatctctgcagtcctgcatgcagttccagccaaattctcctgccagtgacttggaggctgccttggaagctgctggggaaggccttaatgtaatacagcagaccactaggtattttagtactccacaaaccatggatttattcctaaactactccatgaacatgcaacctgaagacgtgtga

SEQ ID NO: 34 - DNA, 759 bp, Homo sapiens
  source 1..759: mol_type = genomic DNA
atgggggtactgctcacacagaggacgctgctcagtctggtccttgcactcctgtttccaagcatggcgagcatggcggctataggcagctgctcgaaagagtaccgcgtgctccttggccagctccagaagcagacagatctcatgcaggacaccagcagactcctggacccctatatacgtatccaaggcctggatgttcctaaactgagagagcactgcagggagcgccccggggccttccccagtgaggagaccctgagggggctgggcaggcggggcttcctgcagaccctcaatgccacactgggctgcgtcctgcacagactggccgacttagagcagcgcctccccaaggcccaggatttggagaggtctgggctgaacatcgaggacttggagaagctgcagatggcgaggccgaacatcctcgggctcaggaacaacatctactgcatggcccagctgctggacaactcagacacggctgagcccacgaaggctggccggggggcctctcagccgcccacccccacccctgcctcggatgcttttcagcgcaagctggagggctgcaggttcctgcatggctaccatcgcttcatgcactcagtggggcgggtcttcagcaagtggggggagagcccgaaccggagccggagacacagcccccaccaggccctgaggaagggggtgcgcaggaccagaccctccaggaaaggcaagagactcatgaccaggggacagctgccccggtag

SEQ ID NO: 35 - DNA, 2940 bp, Homo sapiens
  source 1..2940: mol_type = genomic DNA
atggctctatttgcagtctttcagacaacattcttcttaacattgctgtccttgaggacttaccagagtgaagtcttggctgaacgtttaccattgactcctgtatcacttaaagtttccaccaattctacgcgtcagagtttgcacttacaatggactgtccacaaccttccttatcatcaggaattgaaaatggtatttcagatccagatcagtaggattgaaacatccaatgtcatctgggtggggaattacagcaccactgtgaagtggaaccaggttctgcattggagctgggaatctgagctccctttggaatgtgccacacactttgtaagaataaagagtttggtggacgatgccaagttccctgagccaaatttctggagcaactggagttcctgggaggaagtcagtgtacaagattctactggacaggatatattgttcgttttccctaaagataagctggtggaagaaggcaccaatgttaccatttgttacgtttctaggaacattcaaaataatgtatcctgttatttggaagggaaacagattcatggagaacaacttgatccacatgtaactgcattcaacttgaatagtgtgcctttcattaggaataaagggacaaatatctattgtgaggcaagtcaaggaaatgtcagtgaaggcatgaaaggcatcgttctttttgtctcaaaagtacttgaggagcccaaggacttttcttgtgaaaccgaggacttcaagactttgcactgtacttgggatcctgggacggacactgccttggggtggtctaaacaaccttcccaaagctacactttatttgaatcattttctggggaaaagaaactttgtacacacaaaaactggtgtaattggcaaataactcaagactcacaagaaacctataacttcacactcatagctgaaaattacttaaggaagagaagtgtcaatatcctttttaacctgactcatcgagtttatttaatgaatccttttagtgtcaactttgaaaatgtaaatgccacaaatgccatcatgacctggaaggtgcactccataaggaataatttcacatatttgtgtcagattgaactccatggtgaaggaaaaatgatgcaatacaatgtttccatcaaggtgaacggtgagtacttcttaagtgaactggaacctgccacagagtacatggcgcgagtacggtgtgctgatgccagccacttctggaaatggagtgaatggagtggtcagaacttcaccacacttgaagctgctccctcagaggcccctgatgtctggagaattgtgagcttggagccaggaaatcatactgtgaccttattctggaagccattatcaaaactgcatgccaatggaaagatcctgttctataatgtagttgtagaaaacctagacaaaccatccagttcagagctccattccattccagcaccagccaacagcacaaaactaatccttgacaggtgttcctaccaaatctgcgtcatagccaacaacagtgtgggtgcttctcctgcttctgtaatagtcatctctgcagaccccgaaaacaaagaggttgaggaagaaagaattgcaggcacagagggtggattctctctgtcttggaaaccccaacctggagatgttataggctatgttgtggactggtgtgaccatacccaggatgtgctcggtgatttccagtggaagaatgtaggtcccaataccacaagcacagtcattagcacagatgcttttaggccaggagttcgatatgacttcagaatttatgggttatctacaaaaaggattgcttgtttattagagaaaaaaacaggatactctcaggaacttgctccttcagacaaccctcacgtgctggtggatacattgacatcccactccttcactctgagttggaaagattactctactgaatctcaacctggttttatacaagggtaccatgtctatctgaaatccaaggcgaggcagtgccacccacgatttgaaaaggcagttctttcagatggttcagaatgttgcaaatacaaaattgacaacccggaagaaaaggcattgattgtggacaacctaaagccagaatccttctatgagtttttcatcactccattcactagtgctggtgaaggccccagtgctacgttcacgaaggtcacgactccggatgaacactcctcgatgctgattcatatcctactgcccatggttttctgcgtcttgctcatcatggtcatgtgctacttgaaaagtcagtggatcaaggagacctgttatcctgacatccctgacccttacaagagcagcatcctgtcattaataaaattcaaggagaaccctcacctaataataatgaatgtcagtgactgtatcccagatgctattgaagttgtaagcaagccagaagggacaaagatacagttcctaggcactaggaagtcactcacagaaaccgagttgactaagcctaactacctttatctccttccaacagaaaagaatcactctggccctggcccctgcatctgttttgagaacttgacctataaccaggcagcttctgactctggctcttgtggccatgttccagtatccccaaaagccccaagtatgctgggactaatgacctcacctgaaaatgtactaaaggcactagaaaaaaactacatgaactccctgggagaaatcccagctggagaaacaagtttgaattatgtgtcccagttggcttcacccatgtttggagacaaggacagtctcccaacaaacccagtagaggcaccacactgttcagagtataaaatgcaaatggcagtctccctgcgtcttgccttgcctcccccgaccgagaatagcagcctctcctcaattacccttttagatccaggtgaacactactgctaa

SEQ ID NO: 36 - DNA, 798 bp, Homo sapiens
  source 1..798: mol_type = genomic DNA
atgcacttctacagactattccttggggccacacgtaggttcttgaatcccgaatggaaaggggagattgataactggtgtgtttatgttcttacaagtcttctgccttttaaaatccagtcccaggacatcaaagctctgcagaaagaactcgagcaatttgccaagctcctgaagcagaagaggatcaccctgggatatacacaggccgatgtggggctcaccctgggggttctatttgggaaggtattcagccaaacgaccatctgccgctttgaggctctgcagcttagcttcaagaacatgtgtaagctgcggcccttgctgcagaagtgggtggaggaagctgacaacaatgaaaatcttcaggagatatgcaaagcagaaaccctcgtgcaggcccgaaagagaaagcgaaccagtatcgagaaccgagtgagaggcaacctggagaatttgttcctgcagtgcccgaaacccacactgcagcagatcagccacatcgcccagcagcttgggctcgagaaggatgtggtccgagtgtggttctgtaaccggcgccagaagggcaagcgatcaagcagcgactatgcacaacgagaggattttgaggctgctgggtctcctttctcagggggaccagtgtcctttcctctggccccagggccccattttggtaccccaggctatgggagccctcacttcactgcactgtactcctcggtccctttccctgagggggaagcctttccccctgtctccgtcaccactctgggctctcccatgcattcaaactga

SEQ ID NO: 37 - DNA, 1083 bp, Homo sapiens
  source 1..1083: mol_type = genomic DNA
atggcgggacacctggcttcggatttcgccttctcgccccctccaggtggtggaggtgatgggccaggggggccggagccgggctgggttgatcctcggacctggctaagcttccaaggccctcctggagggccaggaatcgggccgggggttgggccaggctctgaggtgtgggggattcccccatgccccccgccgtatgagttctgtggggggatggcgtactgtgggccccaggttggagtggggctagtgccccaaggcggcttggagacctctcagcctgagggcgaagcaggagtcggggtggagagcaactccgatggggcctccccggagccctgcaccgtcacccctggtgccgtgaagctggagaaggagaagctggagcaaaacccggaggagtcccaggacatcaaagctctgcagaaagaactcgagcaatttgccaagctcctgaagcagaagaggatcaccctgggatatacacaggccgatgtggggctcaccctgggggttctatttgggaaggtattcagccaaacgaccatctgccgctttgaggctctgcagcttagcttcaagaacatgtgtaagctgcggcccttgctgcagaagtgggtggaggaagctgacaacaatgaaaatcttcaggagatatgcaaagcagaaaccctcgtgcaggcccgaaagagaaagcgaaccagtatcgagaaccgagtgagaggcaacctggagaatttgttcctgcagtgcccgaaacccacactgcagcagatcagccacatcgcccagcagcttgggctcgagaaggatgtggtccgagtgtggttctgtaaccggcgccagaagggcaagcgatcaagcagcgactatgcacaacgagaggattttgaggctgctgggtctcctttctcagggggaccagtgtcctttcctctggccccagggccccattttggtaccccaggctatgggagccctcacttcactgcactgtactcctcggtccctttccctgagggggaagcctttccccctgtctccgtcaccactctgggctctcccatgcattcaaactga

SEQ ID NO: 38 - DNA, 953 bp, Homo sapiens
  source 1..953: mol_type = genomic DNA
tgtacaacatgatggagacggagctgaagccgccgggcccgcagcaaacttcggggggcggcggcggcaactccaccgcggcggcggccggcggcaaccagaaaaacagcccggaccgcgtcaagcggcccatgaatgccttcatggtgtggtcccgcgggcagcggcgcaagatggcccaggagaaccccaagatgcacaactcggagatcagcaagcgcctgggcgccgagtggaaacttttgtcggagacggagaagcggccgttcatcgacgaggctaagcggctgcgagcgctgcacatgaaggagcacccggattataaataccggccccggcggaaaaccaagacgctcatgaagaaggataagtacacgctgcccggcgggctgctggcccccggcggcaatagcatggcgagcggggtcggggtgggcgccggcctgggcgcgggcgtgaaccagcgcatggacagttacgcgcacatgaacggctggagcaacggcagctacagcatgatgcaggaccagctgggctacccgcagcacccgggcctcaatgcgcacggcgcagcgcagatgcagcccatgcaccgctacgacgtgagcgccctgcagtacaactccatgaccagctcgcagacctacatgaacggctcgcccacctacagcatgtcctactcgcagcagggcacccctggcatggctcttggctccatgggttcggtggtcaagtccgaggccagctccagcccccctgtggttacctcttcctcccactccagggcgccctgccaggccggggacctccgggacatgatcagcatgtatctccccggcgccgaggtgccggaacccgccgcccccagcagacttcacatgtcccagcactaccagagcggcccggtgcccggcacggccattaacggcacactgcccctctcacacatgtga

SEQ ID NO: 39 - DNA, 621 bp, Homo sapiens
  source 1..621: mol_type = genomic DNA
atgtcggggcccgggacggccgcggtagcgctgctcccggcggtcctgctggccttgctggcgccctgggcgggccgagggggcgccgccgcacccactgcacccaacggcacgctggaggccgagctggagcgccgctgggagagcctggtggcgctctcgttggcgcgcctgccggtggcagcgcagcccaaggaggcggccgtccagagcggcgccggcgactacctgctgggcatcaagcggctgcggcggctctactgcaacgtgggcatcggcttccacctccaggcgctccccgacggccgcatcggcggcgcgcacgcggacacccgcgacagcctgctggagctctcgcccgtggagcggggcgtggtgagcatcttcggcgtggccagccggttcttcgtggccatgagcagcaagggcaagctctatggctcgcccttcttcaccgatgagtgcacgttcaaggagattctccttcccaacaactacaacgcctacgagtcctacaagtaccccggcatgttcatcgccctgagcaagaatgggaagaccaagaaggggaaccgagtgtcgcccaccatgaaggtcacccacttcctccccaggctgtga

SEQ ID NO: 40 - DNA, 1443 bp, Homo sapiens
  source 1..1443: mol_type = genomic DNA
atggaggtggcgccggagcagccgcgctggatggcgcacccggccgtgctgaatgcgcagcaccccgactcacaccacccgggcctggcgcacaactacatggaacccgcgcagctgctgcctccagacgaggtggacgtcttcttcaatcacctcgactcgcagggcaacccctactatgccaaccccgctcacgcgcgggcgcgcgtctcctacagccccgcgcacgcccgcctgaccggaggccagatgtgccgcccacacttgttgcacagcccgggtttgccctggctggacgggggcaaagcagccctctctgccgctgcggcccaccaccacaacccctggaccgtgagccccttctccaagacgccactgcacccctcagctgctggaggccctggaggcccactctctgtgtacccaggggctgggggtgggagcgggggaggcagcgggagctcagtggcctccctcacccctacagcagcccactctggctcccaccttttcggcttcccacccacgccacccaaagaagtgtctcctgaccctagcaccacgggggctgcgtctccagcctcatcttccgcggggggtagtgcagcccgaggagaggacaaggacggcgtcaagtaccaggtgtcactgacggagagcatgaagatggaaagtggcagtcccctgcgcccaggcctagctactatgggcacccagcctgctacacaccaccccatccccacctacccctcctatgtgccggcggctgcccacgactacagcagcggactcttccaccccggaggcttcctggggggaccggcctccagcttcacccctaagcagcgcagcaaggctcgttcctgttcagaaggccgggagtgtgtcaactgtggggccacagccacccctctctggcggcgggacggcaccggccactacctgtgcaatgcctgtggcctctaccacaagatgaatgggcagaaccgaccactcatcaagcccaagcgaagactgtcggccgccagaagagccggcacctgttgtgcaaattgtcagacgacaaccaccaccttatggcgccgaaacgccaacggggaccctgtctgcaacgcctgtggcctctactacaagctgcacaatgttaacaggccactgaccatgaagaaggaagggatccagactcggaaccggaagatgtccaacaagtccaagaagagcaagaaaggggcggagtgcttcgaggagctgtcaaagtgcatgcaggagaagtcatcccccttcagtgcagctgccctggctggacacatggcacctgtgggccacctcccgcccttcagccactccggacacatcctgcccactccgacgcccatccacccctcctccagcctctccttcggccacccccacccgtccagcatggtgaccgccatgggctag

SEQ ID NO: 41 - DNA, 1335 bp, Homo sapiens
  source 1..1335: mol_type = genomic DNA
atggaggtgacggcggaccagccgcgctgggtgagccaccaccaccccgccgtgctcaacgggcagcacccggacacgcaccacccgggcctcagccactcctacatggacgcggcgcagtacccgctgccggaggaggtggatgtgctttttaacatcgacggtcaaggcaaccacgtcccgccctactacggaaactcggtcagggccacggtgcagaggtaccctccgacccaccacgggagccaggtgtgccgcccgcctctgcttcatggatccctaccctggctggacggcggcaaagccctgggcagccaccacaccgcctccccctggaatctcagccccttctccaagacgtccatccaccacggctccccggggcccctctccgtctaccccccggcctcgtcctcctccttgtcggggggccacgccagcccgcacctcttcaccttcccgcccaccccgccgaaggacgtctccccggacccatcgctgtccaccccaggctcggccggctcggcccggcaggacgagaaagagtgcctcaagtaccaggtgcccctgcccgacagcatgaagctggagtcgtcccactcccgtggcagcatgaccgccctgggtggagcctcctcgtcgacccaccaccccatcaccacctacccgccctacgtgcccgagtacagctccggactcttcccccccagcagcctgctgggcggctcccccaccggcttcggatgcaagtccaggcccaaggcccggtccagcacagaaggcagggagtgtgtgaactgtggggcaacctcgaccccactgtggcggcgagatggcacgggacactacctgtgcaacgcctgcgggctctatcacaaaatgaacggacagaaccggcccctcattaagcccaagcgaaggctgtctgcagccaggagagcagggacgtcctgtgcgaactgtcagaccaccacaaccacactctggaggaggaatgccaatggggaccctgtctgcaatgcctgtgggctctactacaagcttcacaatattaacagacccctgactatgaagaaggaaggcatccagaccagaaaccgaaaaatgtctagcaaatccaaaaagtgcaaaaaagtgcatgactcactggaggacttccccaagaacagctcgtttaacccggccgccctctccagacacatgtcctccctgagccacatctcgcccttcagccactccagccacatgctgaccacgcccacgccgatgcacccgccatccagcctgtcctttggaccacaccacccctccagcatggtcaccgccatgggttag

SEQ ID NO: 42 - DNA, 1329 bp, Homo sapiens
  source 1..1329: mol_type = genomic DNA
atgtatcagagcttggccatggccgccaaccacgggccgccccccggtgcctacgaggcgggcggccccggcgccttcatgcacggcgcgggcgccgcgtcctcgccagtctacgtgcccacaccgcgggtgccctcctccgtgctgggcctgtcctacctccagggcggaggcgcgggctctgcgtccggaggcgcctcgggcggcagctccggtggggccgcgtctggtgcggggcccgggacccagcagggcagcccgggatggagccaggcgggagccgacggagccgcttacaccccgccgccggtgtcgccgcgcttctccttcccggggaccaccgggtccctggcggccgccgccgccgctgccgcggcccgggaagctgcggcctacagcagtggcggcggagcggcgggtgcgggcctggcgggccgcgagcagtacgggcgcgccggcttcgcgggctcctactccagcccctacccggcttacatggccgacgtgggcgcgtcctgggccgcagccgccgccgcctccgccggccccttcgacagcccggtcctgcacagcctgcccggccgggccaacccggccgcccgacaccccaatctcgatatgtttgacgacttctcagaaggcagagagtgtgtcaactgtggggctatgtccaccccgctctggaggcgagatgggacgggtcactatctgtgcaacgcctgcggcctctaccacaagatgaacggcatcaaccggccgctcatcaagcctcagcgccggctgtccgcctcccgccgagtgggcctctcctgtgccaactgccagaccaccaccaccacgctgtggcgccgcaatgcggagggcgagcctgtgtgcaatgcctgcggcctctacatgaagctccacggggtccccaggcctcttgcaatgcggaaagaggggatccaaaccagaaaacggaagcccaagaacctgaataaatctaagacaccagcagctccttcaggcagtgagagccttcctcccgccagcggtgcttccagcaactccagcaacgccaccaccagcagcagcgaggagatgcgtcccatcaagacggagcctggcctgtcatctcactacgggcacagcagctccgtgtcccagacgttctcagtcagtgcgatgtctggccatgggccctccatccaccctgtcctctcggccctgaagctctccccacaaggctatgcgtctcccgtcagccagtctccacagaccagctccaagcaggactcttggaacagcctggtcttggccgacagtcacggggacataatcactgcgtaa

SEQ ID NO: 43 - DNA, 1194 bp, Homo sapiens
  source 1..1194: mol_type = genomic DNA
atgtaccagagcctggcgctggccgcgagcccccgccaggccgcctacgccgactcgggctccttcctgcacgctccgggcgccggctctccgatgtttgtgccgccggcgcgcgtcccctcgatgctgtcctacctgtccgggtgtgagccgagcccgcagccccccgagctcgctgcgcgccccggctgggcgcagacagccaccgcggattcgtcggccttcggcccgggcagtccgcaccccccagccgcgcacccgcccggggccaccgccttccctttcgcgcacagcccctcggggcccggcagcggcggcagcgcggggggccgagacggcagtgcctaccagggcgcgctgttgcctcgagaacagttcgcggccccgcttgggcggccggtggggacctcgtactccgccacctacccggcctacgtgagccccgacgtggcccagtcctggactgccgggcccttcgatggcagcgtcctgcacggcctcccaggccgcaggcccaccttcgtgtccgacttcttggaggagttcccgggtgagggtcgtgagtgtgtcaactgcggggccctgtccacaccgctgtggcgccgagatggcaccggccactacctgtgcaatgcctgcggcctctaccacaagatgaatggcgtcaaccggccgctcgttcggcctcagaagcgcctgtcctcgtcccgccgcgccggcctctgctgcaccaactgccacacgaccaacaccacgctgtggcggcggaactcggagggggagcccgtgtgcaatgcctgcggcctctacatgaagctgcacggggtgccgcggcctctggctatgaagaaagaaagcatccagacacggaagcggaagccaaagaccatcgccaaggccaggggctcctcaggatccacaaggaatgcctcggcctccccatctgctgtcgccagcactgacagctcagcagccacttccaaagccaagcccagcctggcgtccccagtgtgccctgggcccagcatggccccccaggcctctggccaggaggatgactctcttgcccccggccacttggagttcaagttcgagcctgaggactttgccttcccctccacggccccgagcccccaggctggcctcaggggggctctgcgccaagaggcctggtgtgcgctggccttggcctag

SEQ ID NO: 44 - DNA, 1788 bp, Homo sapiens
  source 1..1788: mol_type = genomic DNA
atggccttgactgacggcggctggtgcttgccgaagcgcttcggggccgcgggtgcggacgccagcgactccagagcctttccagcgcgggagccctccacgccgccttcccccatctcttcctcgtcctcctcctgctcccggggcggagagcggggccccggcggcgccagcaactgcgggacgcctcagctcgacacggaggcggcggccggacccccggcccgctcgctgctgctcagttcctacgcttcgcatcccttcggggctccccacggaccttcggcgcctggggtcgcgggccccgggggcaacctgtcgagctgggaggacttgctgctgttcactgacctcgaccaagccgcgaccgccagcaagctgctgtggtccagccgcggcgccaagctgagccccttcgcacccgagcagccggaggagatgtaccagaccctcgccgctctctccagccagggtccggccgcctacgacggcgcgcccggcggcttcgtgcactctgcggccgcggcggcagcagccgcggcggcggccagctccccggtctacgtgcccaccacccgcgtgggttccatgctgcccggcctaccgtaccacctgcaggggtcgggcagtgggccagccaaccacgcgggcggcgcgggcgcgcaccccggctggcctcaggcctcggccgacagccctccatacggcagcggaggcggcgcggctggcggcggggccgcggggcctggcggcgctggctcagccgcggcgcacgtctcggcgcgcttcccctactctcccagcccgcccatggccaacggcgccgcgcgggagccgggaggctacgcggcggcgggcagtgggggcgcgggaggcgtgagcggcggcggcagtagcctggcggccatgggcggccgcgagccccagtacagctcgctgtcggccgcgcggccgctgaacgggacgtaccaccaccaccaccaccaccaccaccaccatccgagcccctactcgccctacgtgggggcgccactgacgcctgcctggcccgccggacccttcgagaccccggtgctgcacagcctgcagagccgcgccggagccccgctcccggtgccccggggtcccagtgcagacctgctggaggacctgtccgagagccgcgagtgcgtgaactgcggctccatccagacgccgctgtggcggcgggacggcaccggccactacctgtgcaacgcctgcgggctctacagcaagatgaacggcctcagccggcccctcatcaagccgcagaagcgcgtgccttcatcacggcggcttggattgtcctgtgccaactgtcacaccacaactaccaccttatggcgcagaaacgccgagggtgaacccgtgtgcaatgcttgtggactctacatgaaactccatggggtgcccagaccacttgctatgaaaaaagagggaattcaaaccaggaaacgaaaacctaagaacataaataaatcaaagacttgctctggtaatagcaataattccattcccatgactccaacttccacctcttctaactcagatgattgcagcaaaaatacttcccccacaacacaacctacagcctcaggggcgggtgccccggtgatgactggtgcgggagagagcaccaatcccgagaacagcgagctcaagtattcgggtcaagatgggctctacataggcgtcagtctcgcctcgccggccgaagtcacgtcctccgtgcgaccggattcctggtgcgccctggccctggcctga

SEQ ID NO: 45 - DNA, 1674 bp, Homo sapiens
  source 1..1674: mol_type = genomic DNA
atggtgtccaagctcacgtcgctccagcaagaactcctgagcgccctgctgagctccggggtcaccaaggaggtgctggttcaggccttggaggagttgctgccatccccgaacttcggggtgaagctggagacgctgcccctgtcccctggcagcggggccgagcccgacaccaagccggtcttccatactctcaccaacggccacgccaagggccgcttgtccggcgacgagggctccgaggacggcgacgactatgacacacctcccatcctcaaggagctgcaggcgctcaacaccgaggaggcggcggagcagcgggcggaggtggaccggatgctcagtgaggacccttggagggctgctaaaatgatcaagggttacatgcagcaacacaacatcccccagagggaggtggtcgatgtcaccggcctgaaccagtcgcacctctcccagcatctcaacaagggcacccctatgaagacccagaagcgtgccgctctgtacacctggtacgtcagaaagcaacgagagatcctccgacaattcaaccagacagtccagagttctggaaatatgacagacaaaagcagtcaggatcagctgctgtttctctttccagagttcagtcaacagagccatgggcctgggcagtccgatgatgcctgctctgagcccaccaacaagaagatgcgccgcaaccggttcaaatgggggcccgcgtcccagcaaatcttgtaccaggcctacgatcggcaaaagaaccccagcaaggaagagagagaggccttagtggaggaatgcaacagggcagaatgtttgcagcgaggggtgtccccctccaaagcccacggcctgggctccaacttggtcactgaggtccgtgtctacaactggtttgcaaaccgcaggaaggaggaggcattccggcaaaagctggccatggacgcctatagctccaaccagactcacagcctgaaccctctgctctcccacggctccccccaccaccagcccagctcctctcctccaaacaagctgtcaggagtgcgctacagccagcagggaaacaatgagatcacttcctcctcaacaatcagtcaccatggcaacagcgccatggtgaccagccagtcggttttacagcaagtctccccagccagcctggacccaggccacaatctcctctcacctgatggtaaaatgatctcagtctcaggaggaggtttgcccccagtcagcaccttgacgaatatccacagcctctcccaccataatccccagcaatctcaaaacctcatcatgacacccctctctggagtcatggcaattgcacaaagcctcaacacctcccaagcacagagtgtccctgtcatcaacagtgtggccggcagcctggcagccctgcagcccgtccagttctcccagcagctgcacagccctcaccagcagcccctcatgcagcagagcccaggcagccacatggcccagcagcccttcatggcagctgtgactcagctgcagaactcacacatgtacgcacacaagcaggaacccccccagtattcccacacctcccggtttccatctgcaatggtggtcacagataccagcagcatcagtacactcaccaacatgtcttcaagtaaacagtgtcctctacaagcctggtga

SEQ ID NO: 46 - DNA, 1887 bp, Rattus norvegicus
  source 1..1887: mol_type = genomic DNA
atggtttctaagttgagccagctgcagacggagctcctggctgctctgctcgagtcgggcctgagcaaagaggctctgatccaggctctgggggagcccgggccctacctgatggttggagatggtcccctggacaagggggagtcctgcggtgggactcgaggggacctgaccgagctgcccaatggcctgggggagacgcgtggctcggaagatgacacggatgacgatggggaagacttcgcgccacccattctgaaagagctggagaacctcagcccagaggaggcagcccaccagaaagccgtggtggagtcacttcttcaggaggacccatggcgcgtggcaaagatggtcaagtcgtacctgcagcaacacaacatcccccagcgggaggtggtggacactacgggtctcaaccagtcccacctgtcccagcacctcaacaagggcacccccatgaagacgcagaagcgggccgcgctgtacacctggtacgtccgcaagcagcgagaggtggctcagcaattcacccacgcggggcagggcggactgattgaagagcccacaggtgatgagctgccaaccaaaaaggggcggaggaaccggttcaagtggggccccgcatcccagcagatcctgttccaggcttacgagaggcagaagaaccccagcaaggaagagcgagagaccttggtggaggagtgcaatagggcggagtgcatccagagaggggtgtcaccatcgcaggcccaggggctaggctccaaccttgtcaccgaggtgcgtgtctacaactggtttgccaaccggcgcaaggaagaagcctttcggcataagctggccatggacacgtataacgggcctccacccgggccaggccccggccctgcgctacctgcccacagttccccgggcctgcccacaaccaccctctctcccagtaaggtccacggtgtgcggtatggacagtctgcaaccagcgaggcagctgaggtgccctccagcagcggaggtcccttagtcacagtgtctgcggccttacaccaagtgtcccccacaggcttggagcccagcagcctgctgagcaccgaggccaagctggtctcagccacggggggtcccctgcctcccgtcagcaccctgacagcactgcacagcttggagcagacgtctccaggtctcaaccagcagccgcagaaccttatcatggcctcgctgcctggggtcatgaccatcggcccaggggagcccgcctccctgggtcccacgttcactaacacgggtgcctctaccctggtcattggtctggcctccacacaggcacagagcgtgccagtcatcaacagcatggggagcagcctgaccaccctgcagccggtccagttttcccagccactgcacccttcctatcagcagcctctcatgccccctgtacagagccacgtggcccagagtcccttcatggcaaccatggcccagctgcagagcccccacgccctgtacagccacaagcctgaggtggcccagtacacgcatacaagcctgcttccgcagaccatgctgatcacagacaccaacctcagcacccttgccagcctcacgcccaccaagcaggtcttcacctcagacacagaggcctccagtgagcctgggcttcatgagccgtcgtctccagccacaaccattcacatccccagccaggacccgtcaaacatccagcacctgcagcctgctcaccggctcagcaccagtcccacagtgtcctccagcagcctggtgttgtaccagagttctgactccaacgggcacagccacctgctgccatccaaccacggtgtcatcgagacttttatctccacccagatggcctcctcctcccagtaa

SEQ ID NO: 47 - DNA, 1407 bp, Mus musculus
  source 1..1407: mol_type = genomic DNA
atgttagggactgtgaagatggaagggcatgagagcaacgactggaacagctactacgcggacacgcaggaggcctactcctctgtccctgtcagcaacatgaactccggcctgggctctatgaactccatgaacacctacatgaccatgaacaccatgaccacgagcggcaacatgaccccggcttccttcaacatgtcctacgccaacacgggcttaggggccggcctgagtcccggtgctgtggctggcatgccaggggcctctgcaggcgccatgaacagcatgactgcggcgggcgtcacggccatgggtacggcgctgagcccgggaggcatgggctccatgggcgcgcagcccgtcacctccatgaacggcctgggtccctacgccgccgccatgaacccgtgcatgagtcccatggcgtacgcgccgtccaacctgggccgcagccgcgcggggggcggcggcgacgccaagacattcaagcgcagctaccctcacgccaagccgccttactcctacatctcgctcatcacgatggccatccagcaggcgcccagcaagatgctcacgctgagcgagatctaccagtggatcatggacctcttcccctattaccgccagaaccagcagcgctggcagaactccatccgccactcgctgtccttcaacgattgtttcgtcaaggtggcacgatccccagacaagccaggcaagggctcctactggacgctgcacccggactccggcaacatgttcgagaacggctgctacttgcgccgccaaaagcgcttcaagtgtgagaagcagccgggggccggaggtgggagtgggggcggcggctccaaagggggcccagaaagtcgcaaggacccctcaggcccggggaaccccagcgccgagtcaccccttcattggggtgtgcacggaaaggctagccagctagagggcgcgccggcccccgggcccgccgccagcccccagactctggaccacagcggggccacggcgacagggggcgcttcggagttgaagtctccagcgtcttcatctgcgccccccataagctccgggccaggggcgctggcatctgtacccccctctcacccggctcacggcctggcaccccacgaatctcagctgcatctgaaaggggatccccactactcctttaatcaccccttctccatcaacaacctcatgtcctcctccgagcaacagcacaagctggacttcaaggcatacgagcaggcgctgcagtactctccttatggcgctaccttgcccgccagtctgccccttggcagcgcctcagtggccacgaggagccccatcgagccctcagccctggagccagcctactaccaaggtgtgtattccagacccgtgctaaatacttcctag

SEQ ID NO: 48 - DNA, 1062 bp, Mus musculus
  source 1..1062: mol_type = genomic DNA
atgctgggctcagtgaagatggaggctcatgacctggccgagtggagctactacccggaggcgggcgaggtgtattctccagtgaatcctgtgcccaccatggcccctctcaactcctacatgaccttgaacccactcagctctccctaccctcccggagggcttcaggcctccccactgcctacaggacccctggcacccccagcccccactgcgcccttggggcccaccttcccaagcttgggcactggtggcagcaccggaggcagtgcttccgggtatgtagccccagggcccgggcttgtacatggaaaagagatggcaaaggggtaccggcggccactggcccacgccaaaccaccatattcctacatctctctcataaccatggctattcagcaggctccaggcaagatgctgaccctgagtgaaatctaccaatggatcatggacctcttcccgtactaccgggagaaccagcaacgttggcagaactccatccggcattcgctgtccttcaatgactgcttcgtcaaggtggcacgctccccagacaagccaggcaaaggctcctactgggccttgcatcccagctctgggaacatgtttgagaacggatgctatctccgccggcagaagcgcttcaagctggaggagaaggcaaagaaaggaaacagcgccacatcggccagcaggaatggtactgcggggtcagccacctctgccaccactacagctgccactgcagtcacctccccggctcagccccagcctacgccatctgagcccgaggcccagagtggggatgatgtggggggtctggactgcgcctcacctccttcgtccacaccttatttcagcggcctggagctcccgggggaactaaagttggatgcgccctataacttcaaccaccctttctctatcaacaacctgatgtcagaacagacatcgacaccttccaaactggatgtggggtttgggggctacggggctgagagtggggagcctggagtctactaccagagcctctattcccgctctctgcttaatgcatcctag

SEQ ID NO: 49 - DNA, 1380 bp, Mus musculus
  source 1..1380: mol_type = genomic DNA
atgctgggagccgtgaagatggaagggctcgagccatccgactggagcagctactacgcggagcccgagggctactcttccgtgagcaacatgaacgccggcctggggatgaatggcatgaacacatacatgagcatgtccgcggctgccatgggcggcggttccggcaacatgagcgcgggctccatgaacatgtcatcctatgtgggcgctggaatgagcccgtcgctagctggcatgtccccgggcgccggcgccatggcgggcatgagcggctcagccggggcggccggcgtggcgggcatgggacctcacctgagtccgagtctgagcccgctcgggggacaggcggccggggccatgggtggccttgccccctacgccaacatgaactcgatgagccccatgtacgggcaggccggcctgagccgcgctcgggaccccaagacataccgacgcagctacacacacgccaaacctccctactcgtacatctcgctcatcaccatggccatccagcagagccccaacaagatgctgacgctgagcgagatctatcagtggatcatggacctcttccctttctaccggcagaaccagcagcgctggcagaactccatccgccactctctctccttcaacgactgctttctcaaggtgccccgctcgccagacaagcctggcaagggctccttctggaccctgcacccagactcgggcaacatgttcgagaacggctgctacctgcgccgccagaagcgcttcaagtgtgagaagcaactggcactgaaggaagccgcgggtgcggccagtagcggaggcaagaagaccgctcctgggtcccaggcctctcaggctcagctcggggaggccgcgggctcggcctccgagactccggcgggcaccgagtccccccattccagcgcttctccgtgtcaggagcacaagcgaggtggcctaagcgagctaaagggagcacctgcctctgcgctgagtcctcccgagccggcgccctcgcctgggcagcagcagcaggctgcagcccacctgctgggcccacctcaccacccaggcctgccaccagaggcccacctgaagcccgagcaccattacgccttcaaccaccccttctctatcaacaacctcatgtcgtccgagcagcaacatcaccacagccaccaccaccatcagccccacaaaatggacctcaaggcctacgaacaggtcatgcactacccagggggctatggttcccccatgccaggcagcttggccatgggcccagtcacgaacaaagcgggcctggatgcctcgcccctggctgcagacacttcctactaccaaggagtgtactccaggcctattatgaactcatcctaa

SEQ ID NO: 50 - DNA, 1053 bp, Homo sapiens
  source 1..1053: mol_type = genomic DNA
atgctgggctcagtgaagatggaggcccatgacctggccgagtggagctactacccggaggcgggcgaggtctactcgccggtgaccccagtgcccaccatggcccccctcaactcctacatgaccctgaatcctctaagctctccctatccccctggggggctccctgcctccccactgccctcaggacccctggcacccccagcacctgcagcccccctggggcccactttcccaggcctgggtgtcagcggtggcagcagcagctccgggtacggggccccgggtcctgggctggtgcacgggaaggagatgccgaaggggtatcggcggcccctggcacacgccaagccaccgtattcctatatctcactcatcaccatggccatccagcaggcgccgggcaagatgctgaccttgagtgaaatctaccagtggatcatggacctcttcccttactaccgggagaatcagcagcgctggcagaactccattcgccactcgctgtctttcaacgactgcttcgtcaaggtggcgcgttccccagacaagcctggcaagggctcctactgggccctacaccccagctcagggaacatgtttgagaatggctgctacctgcgccgccagaaacgcttcaagctggaggagaaggtgaaaaaagggggcagcggggctgccaccaccaccaggaacgggacagggtctgctgcctcgaccaccacccccgcggccacagtcacctccccgccccagcccccgcctccagcccctgagcctgaggcccagggcggggaagatgtgggggctctggactgtggctcacccgcttcctccacaccctatttcactggcctggagctcccaggggagctgaagctggacgcgccctacaacttcaaccaccctttctccatcaacaacctaatgtcagaacagacaccagcacctcccaaactggacgtggggtttgggggctacggggctgaaggtggggagcctggagtctactaccagggcctctattcccgctctttgcttaatgcatcctag

SEQ ID NO: 51 - DNA, 1422 bp, Homo sapiens
  source 1..1422: mol_type = genomic DNA
atgttaggaactgtgaagatggaagggcatgaaaccagcgactggaacagctactacgcagacacgcaggaggcctactcctcggtcccggtcagcaacatgaactcaggcctgggctccatgaactccatgaacacctacatgaccatgaacaccatgactacgagcggcaacatgaccccggcgtccttcaacatgtcctatgccaacccggccttaggggccggcctgagtcccggcgcagtagccggcatgccggggggctcggcgggcgccatgaacagcatgactgcggccggcgtgacggccatgggtacggcgctgagcccgagcggcatgggcgccatgggtgcgcagcaggcggcctccatgatgaatggcctgggcccctacgcggccgccatgaacccgtgcatgagccccatggcgtacgcgccgtccaacctgggccgcagccgcgcgggcggcggcggcgacgccaagacgttcaagcgcagttacccgcacgccaagccgccctactcgtacatctcgctcatcaccatggccatccagcgggcgcccagcaagatgctcacgctgagcgagatctaccagtggatcatggacctcttcccctattaccggcagaaccagcagcgctggcagaactccatccgccactcgctgtccttcaatgactgcttcgtcaaggtggcacgctccccggacaagccgggcaagggctcctactggacgctgcacccggactccggcaacatgttcgagaacggctgctacttgcgccgccagaagcgcttcaagtgcgagaagcagccgggggccggcggcgggggcgggagcggaagcgggggcagcggcgccaagggcggccctgagagccgcaaggacccctctggcgcctctaaccccagcgccgactcgcccctccatcggggtgtgcacgggaagaccggccagctagagggcgcgccggccccgggcccggccgccagcccccagactctggaccacagtggggcgacggcgacagggggcgcctcggagttgaagactccagcctcctcaactgcgccccccataagctccgggcccggggcgctggcctctgtgcccgcctctcacccggcacacggcttggcaccccacgagtcccagctgcacctgaaaggggacccccactactccttcaaccacccgttctccatcaacaacctcatgtcctcctcggagcagcagcataagctggacttcaaggcatacgaacaggcactgcaatactcgccttacggctctacgttgcccgccagcctgcctctaggcagcgcctcggtgaccaccaggagccccatcgagccctcagccctggagccggcgtactaccaaggtgtgtattccagacccgtcctaaacacttcctag

SEQ ID NO: 52 - DNA, 1425 bp, Mus musculus
  source 1..1425: mol_type = genomic DNA
atgcgactctctaaaacccttgccggcatggatatggccgactacagcgctgccctggacccagcctacaccaccctggagtttgaaaatgtgcaggtgttgaccatgggcaatgacacgtccccatctgaaggtgccaacctcaattcatccaacagcctgggcgtcagtgccctgtgcgccatctgtggcgaccgggccaccggcaaacactacggagcctcgagctgtgacggctgcaaggggttcttcaggaggagcgtgaggaagaaccacatgtactcctgcaggtttagccgacaatgtgtggtagacaaagataagaggaaccagtgtcgttactgcaggcttaagaagtgcttccgggctggcatgaagaaggaagctgtccaaaatgagcgggaccggatcagcacgcggaggtcaagctacgaggacagcagcctgccctccatcaacgcgctcctgcaggcagaggttctgtcccagcagatcacctctcccatctctgggatcaatggcgacattcgggcaaagaagattgccaacatcacagacgtgtgtgagtctatgaaggagcagctgctggtcctggtcgagtgggccaagtacatcccggccttctgcgaactccttctggatgaccaggtggcgctgctcagggcccacgccggtgagcatctgctgcttggagccaccaagaggtccatggtgtttaaggacgtgctgctcctaggcaatgactacatcgtccctcggcactgtccagagctagcggagatgagccgtgtgtccatccgcatcctcgatgagctggtcctgcccttccaagagctgcagattgatgacaatgaatatgcctgcctcaaagccatcatcttctttgatccagatgccaaggggctgagtgacccgggcaagatcaagcggctgcggtcacaggtgcaagtgagcctggaggattacatcaacgaccggcagtacgactctcggggccgctttggagagctgctgctgctgttgcccacgctgcagagcatcacctggcagatgatcgaacagatccagttcatcaagctcttcggcatggccaagattgacaacctgctgcaggagatgcttctcggagggtctgccagtgatgcaccccacacccaccaccccctgcaccctcacctgatgcaagaacacatgggcaccaatgtcattgttgctaacacgatgccctctcacctcagcaatggacagatgtgtgagtggccccgacccagggggcaggcagccactcccgagactccacagccatcaccaccaagtggctcgggatctgaatcctacaagctcctgccaggagccatcaccaccatcgtcaagcctccctctgccattccccagccaacgatcaccaagcaagaagccatctag

SEQ ID NO: 53 - DNA, 1398 bp, Rattus norvegicus
  source 1..1398: mol_type = genomic DNA
atggacatggctgactacagtgctgccttggacccagcctacaccaccctggagtttgaaaatgtgcaggtgttgaccatgggcaatgacacatccccatctgaaggtgccaacctcaactcatccaacagcctgggtgtcagtgccctgtgtgccatctgtggcgatcgggccactggcaaacactacggagcctcaagctgtgacggctgcaagggattcttcaggaggagcgtgaggaagaaccacatgtactcctgcaggtttagcaggcagtgcgtggtagacaaagataagaggaaccagtgtcgttactgcaggctcaagaagtgcttccgggctggcatgaagaaagaagccgtccaaaatgagcgggatcggatcagcacgcggaggtcaagctacgaggacagcagcctaccctccattaatgcgctcctgcaggcagaggtcctgtctcagcagatcacctcccccatctctgggatcaatggcgacattcgggccaagaagattgccaacatcacggatgtgtgtgagtctatgaaggagcagctgctggttctggtcgaatgggccaagtacatcccggccttctgtgaacttcttctggatgaccaggtggcgctgctcagagcccacgctggtgagcacctgctgcttggagccaccaagaggtccatggtgttcaaggatgtgctgctcctaggcaatgactacatcgtccctcggcactgtccagagctagcagagatgagccgtgtgtccattcgcatcctcgatgagctggtcttgcccttccaagagctgcagatcgatgataatgaatacgcctgcctcaaagccatcatcttctttgacccagatgccaaggggctgagtgacccaggcaagatcaagcggctgcggtcacaggtgcaggtgagcctggaggattacatcaacgaccggcagtatgactctcggggtcgttttggagagctgctgctgctcctgcccactctgcagagcattacctggcagatgatcgagcagatccagttcatcaagctctttggcatggccaagattgacaacctgctgcaggagatgctgcttggagggtctgccagtgacgcgccccacgcccaccaccccctgcaccctcacctgatgcaagaacacatgggcaccaatgtcatagttgccaacacgatgccctctcacctcagcaatggacagatgtgtgagtggccccggcccagggggcaggcagccacccctgagactccacagccatcaccaccaagtggctctggatctgaatcctacaagctcctgccaggagccatcaccaccatcgtcaagcctccctctgccatcccccagccaacgatcaccaagcaggaagccatctag

SEQ ID NO: 54 - DNA, 1398 bp, Mus musculus
  source 1..1398: mol_type = genomic DNA
atgaacgcacagctgaccatggaggcgatcggcgagctgcacggggtgagccatgagccggtgcccgcccctgctgacctgctgggcggcagccctcacgcgcgcagctccgtgggacaccgcggcagccacctgcctcccgcgcacccgcgttccatgggcatggcgtccctgctggacggcggcagcggaggcagcgattaccaccaccaccaccgcgcccctgagcacagcttggctggccccctgcaccccaccatgaccatggcctgtgaaactcccccaggtatgagcatgcccaccacctacactaccttaacccctctgcagccgctgccgcccatctccaccgtgtccgacaagttccctcaccatcatcaccaccaccatcaccaccaccacccacaccaccaccagcgcctggcgggcaacgtgagcggtagtttcacacttatgcgggatgagcgcgggctggcctctatgaataacctctataccccctaccacaaggacgtggctggcatgggccagagcctctcgcccctctctggctccggtctgggcagcattcacaactcccagcaaggacttccccactatgctcatcccggcgcggctatgcccaccgacaagatgctcaccccaaatggctttgaagcccaccaccctgccatgctcggtcgccacggggagcagcacctcacgcccacctcggccggcatggtacccatcaacggccttcctccgcaccatcctcatgcccacctgaatgcccagggccacggacagctcctgggcacagcccgagagcccaacccttcggtgaccggcgcgcaggtcagcaatggaagtaattcagggcagatggaagagatcaataccaaagaggtggcgcagcgtatcaccaccgagctcaaacgttacagcatcccacaggccatcttcgcgcagagggtgctctgccgttcccaggggaccctttcggacctgctgcgaaaccccaagccctggagcaaactcaagtcgggtcgggagaccttccggaggatgtggaagtggctgcaggagccggagttccagcgcatgtcggcgctccgcttagcagcctgcaaacggaaagagcaagaacatgggaaggacagaggcaacacccccaaaaagcccaggctggtcttcacagacgtccaacgtcgaactctacatgcaatattcaaggaaaataagcgtccgtccaaagaattacaaatcaccatctcccagcagctggggttggagctgagcactgtcagcaacttcttcatgaatgccagaaggaggagtctggacaagtggcaggacgagggcggctccaactcaggcagttcatcgtcctcatcgagcacttgtaccaaagcatga

SEQ ID NO: 55 - DNA, 1002 bp, Xenopus laevis
  source 1..1002: mol_type = genomic DNA
atggagaagtccaagaatttcaggattgacgctctcctggcgatagatccccccaaggctcagacctccccattggctctggtcacctcgctgtcctcctcgtctctctccgggagccccccgtccgagcacactgacagcctcaggactgactccccctcccctccaaggacttgtggactggtccctaaaccaggtttcctgagcagccaccagcaccccccaaacatgatgtcattgcacccccaggctgctccagggatcccccctcaggccctgtatggacacccgatgtacagctacttggcagcggggcagcacccagctctgtcctacccctactcccagatgcagagcagccaccacccccaccccatggaccccatcaagatcagcgctggcaccttccaactggaccagtggctcagagcctccactgccggcatgatgctgcccaaaatggcagactttaactcccaggcccaatccaacctgctgggaaagtgcagaagaccaaggacagcgtttaccagtcagcagctgttggaactggagcaccaattcaagctgaacaagtacctctccaggccgaaacgctttgaagtggccacttccctgatgctcactgagacgcaggtgaagatctggttccagaacaggcgcatgaaatggaagaggagtaagaaagccaaggagcaggcggcgcaggactcagcagagaaacagcagagggcaggcaagggcagcagcgaggagaagtgctcggatgagctgcaggaagagaagaaatcctaccatctccatcccaggggggagcccatcaaagggaacggccgcctgcagcccagagactatacagacagcgaagaggacgaggaggaggacagggaagaggaggaagaggaagatcacagaggggaggggaagcggttttaccatcattcttctgactgcacatccgaggaagaggagaacagccacaataagcagagcggccactga

SEQ ID NO: 56 - DNA, 1215 bp, Mus musculus
  source 1..1215: mol_type = genomic DNA
atggaaaaatccaaaaatttccgcatcgacgccctgctggccgtggatcccccgcgagccgcctccacgcagagcgcgcctctggccttggtcacttccctcgcgactacagtatctggtcccggccgcggcggcagcggcggcggggggaccagtagcggggcgagccgtagctgcagtcccgcatcctcggaggccactgcagcgcccggtgaccggctgagagctgagagcccgtcgcccccacgcttgctggctgcacactgcgcgctgctgcccaagcccggattcctgggcgccggaggaggcggcggcgcggcgggtgggccgggcactccccaccaccacgcgcaccctggtgcagcagccgccgcggctgccgctgccgctgccgcggctgccggtggcctggcactggggctgcacccggggggcgcacagggcggcgcgggcctccctgcacaggcggctctctatggacacccggtctacagttattcggcagcagctgcagcggccgcgctagctggccagcacccggcgctttcctactcataccctcaggtgcagggcgcgcaccctgcgcaccctgccgaccccatcaagctgggtgccagcaccttccaactggaccagtggctgcgcgcgtctactgcgggcatgatcctgcccaagatgccggacttcagctgtcaggcgcagtcgaacctcttggggaagtgccgaaggcctcgcacggccttcaccagccagcagctgttggagctggaacaccagttcaagctcaacaagtacctgtctcgacccaagcgttttgaggtggctacctcgctcatgctcaccgagactcaggtgaagatttggttccagaaccgccgaatgaaatggaaacgcagcaaaaaggccaaagagcaggctgcgcaggaggcggagaagcagaagggcggcggcgggggcaccggcaaaggcggcagtgaggagaagacggaagaggagctgatggggcctccggtttcgggggacaaggcaagcggccgtcgcctgcgggacttgcgggacagtgaccctgatgaggacgaggatgatgaagaagaggacaacttcccgtacagcaatggtgccggtgcccatgctgcctcatccgactgctcatctgaggacgactcgcctcctccaagactaggcgggcctggacaccaacctctgccccagtag

SEQ ID NO: 57 - DNA, 1215 bp, Homo sapiens; identical to SEQ ID NO: 56
  source 1..1215: mol_type = genomic DNA

SEQ ID NO: 58 - DNA, 846 bp, Homo sapiens
  source 1..846: mol_type = genomic DNA
atgacttccaaggaggacggcaaggcggcgccgggggaggagcggcggcgcagcccgctggaccacctgcctccgcctgccaactccaacaagccactgacgccgttcagcatcgaggacatcctcaacaagccgtctgtgcggagaagttactcgctgtgcggggcggcgcacctgctggccgccgcggacaagcacgcgcagggcggcttgcccctggcgggccgcgcgctgctctcgcagacctcgccgctgtgcgcgctggaggagctcgccagcaagacgtttaaggggctggaggtcagcgttctgcaggcagccgaaggccgcgacggtatgaccatctttgggcagcggcagacccctaagaagcggcgaaagtcgcgcacggccttcaccaaccaccagatctatgaattggaaaagcgctttctataccagaagtacctgtcccccgccgatcgcgaccaaatcgcgcagcagctgggcctcaccaacgcgcaagtcatcacctggttccagaatcggcgcgctaagctcaagcgggacctggaggagatgaaggccgacgtagagtccgccaagaaactgggccccagcgggcagatggacatcgtggcgctggccgaactcgagcagaactcggaggccacagccggcggtggcggcggctgcggcagggccaagtcgaggcccggctctccggtcctccccccaggcgccccgaaggccccgggcgctggcgccctgcagctctcgcctgcctctccgctcacggaccagccggccagcagccaggactgctcggaggacgaggaagacgaagagatcgacgtggacgattga

SEQ ID NO: 59 - DNA, 1119 bp, Mus musculus
  source 1..1119: mol_type = genomic DNA
atgttggacggcatcaagatggaggagcacgccctgcgccccgggcccgccactctgggggtgctgctgggctccgactgcccgcatcccgccgtctgcgagggctgccagcggcccatctccgaccgcttcctgatgcgagtcaacgagtcgtcctggcacgaggagtgtttgcagtgcgcggcgtgtcagcaagccctcaccaccagctgctacttccgggatcggaaactgtactgcaaacaagactaccaacagctcttcgcggccaagtgcagcggctgcatggagaagatcgcccccaccgagttcgtgatgcgggcgctggagtgcgtgtaccacctgggctgcttctgctgctgcgtgtgtgaacggcagctacgcaagggcgacgaattcgtgctcaaggagggccagctgctgtgcaagggtgactacgagaaggagaaggacctgctcagctccgtgagccccgacgagtccgactccgtgaagagcgaggatgaagatggggacatgaagccggccaaggggcagggcagtcagagcaagggcagcggggatgacgggaaggacccgcggaggcccaagcgaccccggaccatcctcaccacgcagcagcgaagagccttcaaggcctccttcgaggtctcgtcgaagccttgccgaaaggtccgagagacactggcagctgagacgggcctcagtgtgcgcgtggtccaggtctggtttcagaaccaaagagcaaagatgaagaagctggcgcggcggcaccagcagcagcaggagcagcagaactcccagcggctgggccaggaggtcctgtccagccgcatggagggcatgatggcttcctacacgccgctggccccaccacagcagcagatcgtggccatggaacagagcccctacggcagcagcgaccccttccagcagggcctcacgccgccccaaatgccagggaacgactccatcttccatgacatcgacagcgatacctccttaaccagcctcagcgactgcttcctcggctcctcagacgtgggctccctgcaggcccgcgtggggaaccccatcgaccggctctactccatgcagagttcctacttcgcctcctga

SEQ ID NO: 60 - DNA, 714 bp, Homo sapiens
  source 1..714: mol_type = genomic DNA
atgccagcccgccttgagacctgcatctccgacctcgactgcgccagcagcagcggcagtgacctatccggcttcctcaccgacgaggaagactgtgccagactccaacaggcagcctccgcttcggggccgcccgcgccggcccgcaggggcgcgcccaatatctcccgggcgtctgaggttccaggggcacaggacgacgagcaggagaggcggcggcgccgcggccggacgcgggtccgctccgaggcgctgctgcactcgctgcgcaggagccggcgcgtcaaggccaacgatcgcgagcgcaaccgcatgcacaacttgaacgcggccctggacgcactgcgcagcgtgctgccctcgttccccgacgacaccaagctcaccaaaatcgagacgctgcgcttcgcctacaactacatctgggctctggccgagacactgcgcctggcggatcaagggctgcccggaggcggtgcccgggagcgcctcctgccgccgcagtgcgtcccctgcctgcccggtcccccaagccccgccagcgacgcggagtcctggggctcaggtgccgccgccgcctccccgctctctgaccccagtagcccagccgcctccgaagacttcacctaccgccccggcgaccctgttttctccttcccaagcctgcccaaagacttgctccacacaacgccctgtttcattccttaccactag

SEQ ID NO: 61 - DNA, 819 bp, Homo sapiens
  source 1..819: mol_type = genomic DNA
atgttcgtcaaatccgagaccttggagttgaaggaggaagaggacgtgttagtgctgctcggatcggcctcccccgccttggcggccctgaccccgctgtcatccagcgccgacgaagaagaggaggaggagccgggcgcgtcaggcggggcgcgtcggcagcgcggggctgaggccgggcagggggcgcggggcggcgtggctgcgggtgcggagggctgccggcccgcacggctgctgggtctggtacacgattgcaaacggcgcccttcccgggcgcgggccgtctcccgaggcgccaagacggccgagacggtgcagcgcatcaagaagacccgtagactgaaggccaacaaccgcgagcgaaaccgcatgcacaacctcaacgcggcactggacgcgctgcgcgaggtgctccccacgttccccgaggacgccaagctcaccaagatcgagaccctgcgcttcgcccacaactacatctgggcactcaccgagaccctgcgcctggcggatcactgcgggggcggcggcgggggcctgccgggggcgctcttctccgaggcagtgttgctgagcccgggaggcgccagcgccgccctgagcagcagcggagacagcccctcgcccgcctccacgtggagttgcaccaacagccccgcgccgtcctcctccgtgtcctccaattccacctccccctacagctgcactttatcgcccgccagcccggccgggtcagacatggactattggcagcccccacctcccgacaagcaccgctatgcacctcacctccccatagccagggattgtatctag

SEQ ID NO: 62 - DNA, 645 bp, Mus musculus
  source 1..645: mol_type = genomic DNA
atgacgcctcaaccctcgggtgcgcccactgtccaagtgacccgtgagacggagcggtccttccccagagcctcggaagacgaagtgacctgccccacgtccgccccgcccagccccactcgcacacgggggaactgcgcagaggcggaagagggaggctgccgaggggccccgaggaagctccgggcacggcgcgggggacgcagccggcctaagagcgagttggcactgagcaagcagcgacggagtcggcgaaagaaggccaacgaccgcgagcgcaatcgaatgcacaacctcaactcggcactggacgccctgcgcggtgtcctgcccaccttcccagacgacgcgaagctcaccaagatcgagacgctgcgcttcgcccacaactacatctgggcgctgactcaaacgctgcgcatagcggaccacagcttgtacgcgctggagccgccggcgccgcactgcggggagctgggcagcccaggcggttcccccggggactgggggtccctctactccccagtctcccaggctggcagcctgagtcccgccgcgtcgctggaggagcgacccgggctgctgggggccaccttttccgcctgcttgagcccaggcagtctggctttctcagattttctgtga

SEQ ID NO: 63 - DNA, 711 bp, Homo sapiens
  source 1..711: mol_type = genomic DNA
atggaaagctctgccaagatggagagcggcggcgccggccagcagccccagccgcagccccagcagcccttcctgccgcccgcagcctgtttctttgccacggccgcagccgcggcggccgcagccgccgcagcggcagcgcagagcgcgcagcagcagcagcagcagcagcagcagcagcagcaggcgccgcagctgagaccggcggccgacggccagccctcagggggcggtcacaagtcagcgcccaagcaagtcaagcgacagcgctcgtcttcgcccgaactgatgcgctgcaaacgccggctcaacttcagcggctttggctacagcctgccgcagcagcagccggccgccgtggcgcgccgcaacgagcgcgagcgcaaccgcgtcaagttggtcaacctgggctttgccacccttcgggagcacgtccccaacggcgcggccaacaagaagatgagtaaggtggagacactgcgctcggcggtcgagtacatccgcgcgctgcagcagctgctggacgagcatgacgcggtgagcgccgccttccaggcaggcgtcctgtcgcccaccatctcccccaactactccaacgacttgaactccatggccggctcgccggtctcatcctactcgtcggacgagggctcttacgacccgctcagccccgaggagcaggagcttctcgacttcaccaactggttctga

SEQ ID NO: 64 - DNA, 957 bp, Mus musculus
  source 1..957: mol_type = genomic DNA
atggagcttctatcgccgccactccgggacatagacttgacaggccccgacggctctctctgctcctttgagacagcagacgacttctatgatgacccgtgtttcgactcaccagacctgcgcttttttgaggacctggacccgcgcctggtgcacatgggagccctcctgaaaccggaggagcacgcacacttccctactgcggtgcacccaggcccaggcgctcgtgaggatgagcatgtgcgcgcgcccagcgggcaccaccaggcgggtcgctgcttgctgtgggcctgcaaggcgtgcaagcgcaagaccaccaacgctgatcgccgcaaggccgccaccatgcgcgagcgccgccgcctgagcaaagtgaatgaggccttcgagacgctcaagcgctgcacgtccagcaacccgaaccagcggctacccaaggtggagatcctgcgcaacgccatccgctacatcgaaggtctgcaggctctgctgcgcgaccaggacgccgcgccccctggcgccgctgccttctacgcacctggaccgctgcccccaggccgtggcagcgagcactacagtggcgactcagatgcatccagcccgcgctccaactgctctgatggcatgatggattacagcggccccccaagcggcccccggcggcagaatggctacgacaccgcctactacagtgaggcggcgcgcgagtccaggccagggaagagtgcggctgtgtcgagcctcgactgcctgtccagcatagtggagcgcatctccacagacagccccgctgcgcctgcgctgcttttggcagatgcaccaccagagtcgcctccgggtccgccagagggggcatccctaagcgacacagaacagggaacccagaccccgtctcccgacgccgcccctcagtgtcctgcaggctcaaaccccaatgcgatttatcaggtgctttga

SEQ ID NO: 65 - DNA, 963 bp, Homo sapiens
  source 1..963: mol_type = genomic DNA
atggagctactgtcgccaccgctccgcgacgtagacctgacggcccccgacggctctctctgctcctttgccacaacggacgacttctatgacgacccgtgtttcgactccccggacctgcgcttcttcgaagacctggacccgcgcctgatgcacgtgggcgcgctcctgaaacccgaagagcactcgcacttccccgcggcggtgcacccggccccgggcgcacgtgaggacgagcatgtgcgcgcgcccagcgggcaccaccaggcgggccgctgcctactgtgggcctgcaaggcgtgcaagcgcaagaccaccaacgccgaccgccgcaaggccgccaccatgcgcgagcggcgccgcctgagcaaagtaaatgaggcctttgagacactcaagcgctgcacgtcgagcaatccaaaccagcggttgcccaaggtggagatcctgcgcaacgccatccgctatatcgagggcctgcaggctctgctgcgcgaccaggacgccgcgccccctggcgccgcagccgccttctatgcgccgggcccgctgcccccgggccgcggcggcgagcactacagcggcgactccgacgcgtccagcccgcgctccaactgctccgacggcatgatggactacagcggccccccgagcggcgcccggcggcggaactgctacgaaggcgcctactacaacgaggcgcccagcgaacccaggcccgggaagagtgcggcggtgtcgagcctagactgcctgtccagcatcgtggagcgcatctccaccgagagccctgcggcgcccgccctcctgctggcggacgtgccttctgagtcgcctccgcgcaggcaagaggctgccgcccccagcgagggagagagcagcggcgaccccacccagtcaccggacgccgccccgcagtgccctgcgggtgcgaaccccaacccgatataccaggtgctctga

SEQ ID NO: 66 - DNA, 768 bp, Homo sapiens
  source 1..768: mol_type = genomic DNA
atggacgtgatggatggctgccagttctcaccttctgagtacttctacgacggctcctgcataccgtcccccgagggtgaatttggggacgagtttgtgccgcgagtggctgccttcggagcgcacaaagcagagctgcagggctcagatgaggacgagcacgtgcgagcgcctaccggccaccaccaggctggtcactgcctcatgtgggcctgcaaagcctgcaagaggaagtccaccaccatggatcggcggaaggcagccactatgcgcgagcggaggcgcctgaagaaggtcaaccaggctttcgaaaccctcaagaggtgtaccacgaccaaccccaaccagaggctgcccaaggtggagatcctcaggaatgccatccgctacatcgagagcctgcaggagttgctgagagagcaggtggagaactactatagcctgccgggacagagctgctcggagcccaccagccccacctccaactgctctgatggcatgcccgaatgtaacagtcctgtctggtccagaaagagcagtacttttgacagcatctactgtcctgatgtatcaaatgtatatgccacagataaaaactccttatccagcttggattgcttatccaacatagtggaccggatcacctcctcagagcaacctgggttgcctctccaggatctggcttctctctctccagttgccagcaccgattcacagcctgcaactccaggggcttctagttccaggcttatctatcatgtgctatga

SEQ ID NO: 67 - DNA, 729 bp, Homo sapiens
  source 1..729: mol_type = genomic DNA
atgatgatggacctttttgaaactggctcctatttcttctacttggatggggaaaatgttactctgcagccattagaagtggcagaaggctctcctttgtatccagggagtgatggtaccttgtccccctgccaggaccaaatgcccccggaagcggggagcgacagcagcggagaggaacatgtcctggcgcccccgggcctgcagcctccacactgccccggccagtgtctgatctgggcttgcaagacctgcaagagaaaatctgcccccactgaccggcgaaaagccgccaccctgcgcgaaaggaggaggctaaagaaaatcaacgaggccttcgaggcactgaagcggcgaactgtggccaaccccaaccagaggctgcccaaggtggagattctgcggagcgccatcagctatattgagcggctgcaggacctgctgcaccggctggatcagcaggagaagatgcaggagctgggggtggaccccttcagctacagacccaaacaagaaaatcttgagggtgcggatttcctgcgcacctgcagctcccagtggccaagtgtttccgatcattccagggggctcgtgataacggctaaggaaggaggagcaagtattgattcgtcagcctcgagtagccttcgatgcctttcttccatcgtggacagtatttcctcggaggaacgcaaactcccctgcgtggaggaagtggtggagaagtaa

SEQ ID NO: 68 - DNA, 1356 bp, Homo sapiens
  source 1..1356: mol_type = genomic DNA
atgccgaagaacaagaagcggaacactccccaccgcggtagcagtgctggcggcggcgggtcaggagcagccgcagcgacggcggcgacagcaggtggccagcatcgaaatgttcagccttttagtgatgaagatgcatcaattgaaacaatgagccattgcagtggttatagcgatccttccagttttgctgaagatggaccagaagtccttgatgaggaaggaactcaagaagacctagagtacaagttgaagggattaattgacctaaccctggataagagtgcgaagacaaggcaagcagctcttgaaggtattaaaaatgcactggcttcaaaaatgctgtatgaatttattctggaaaggagaatgactttaactgatagcattgaacgctgcctgaaaaaaggtaagagtgatgagcaacgtgcagctgcagcgttagcatctgttctttgtattcagctgggccctggaattgaaagtgaagagattttgaaaactcttggaccaatcctaaagaaaatcatttgtgatgggtcagctagtatgcaggctaggcaaacttgtgcaacttgctttggtgtttgctgttttattgccacagatgacattactgaactatactcaactctggaatgtttggaaaatatcttcactaaatcctatctcaaagagaaagacactactgttatttgcagcactcctaatacagtgcttcatatcagctctcttcttgcatggacactactgctgaccatatgcccaatcaatgaagtgaagaaaaagcttgagatgcatttccataagcttccaagcctcctctcttgtgatgatgtaaacatgagaatagctgctggtgaatctttggcacttctctttgaattggccagaggaatagagagtgactttttttatgaagacatggagtccttgacgcagatgcttagggccttggcaacagatggaaataaacaccgggccaaagtggacaagagaaagcagcggtcagttttcagagatgtcctgagggcagtggaggaacgggattttccaacagaaaccattaaatttggtcctgaacgcatgtatattgattgctgggtaaaaaaacacacctatgacacctttaaggaggttcttggatcagggatgcagtaccacttgcagtcaaatgaattccttcgaaatgtatttgaacttggacccccagtgatgcttgatgctgcaacgcttaaaacgatgaagatttctcgtttcgaaaggcatttatataactctgcagccttcaaagctcgaaccaaagctagaagcaaatgtcgagataagagagcagatgttggagaattcttctag

SEQ ID NO: 69 - DNA, 1524 bp, Rattus norvegicus
  source 1..1524: mol_type = genomic DNA
atggggcggaagaaaatacaaatcacacgcataatggatgaaaggaaccgacaggtcacttttacaaagagaaagtttggattaatgaagaaagcctatgaacttagtgtgctctgtgactgtgaaatagcactcatcattttcaacagctctaacaaactgtttcaatatgctagcactgatatggacaaagttcttctcaagtatacagaatataatgaacctcatgaaagcagaaccaactcggatattgttgaggctctgaacaagaaggaacacagagggtgcgacagcccagaccctgatacttcatatgtgctaactccacatacagaagaaaaatataaaaaaattaatgaggaatttgataatatgatgcggaatcataaaatcgcacctggtctgccacctcagaacttttcaatgtctgtcacagttccagtgaccagccccaatgctttgtcctacactaacccagggagttcactggtgtccccatctttggcagccagctcaacgttaacagattcaagcatgctctctccacctcaaaccacattacatagaaatgtgtctcctggagctcctcagagaccaccaagtactggcaatgcaggtgggatgttgagcactacagacctcacagtgccaaatggagctggaagcagtccagtggggaatggatttgtaaactcaagagcttctccaaatttgattggagctactggtgcaaatagcttaggcaaagtcatgcctacaaagtctccccctccaccaggtggtggtaatcttggaatgaacagtaggaaaccagatcttcgagttgtcatccccccttcaagcaagggcatgatgcctccactatcggaggaagaggaattggagttgaacacccaaaggatcagtagttctcaagccactcaacctcttgctaccccagtcgtgtctgtgacaaccccaagcttgcctccgcaaggacttgtgtactcagcaatgccgactgcctacaacactgattattcactgaccagcgctgacctgtcagcccttcaaggcttcaactcgccaggaatgctgtcgctgggacaggtgtcggcctggcagcagcaccacctaggacaagcagccctcagctctcttgttgctggagggcagttatctcagggttccaatttatccattaataccaaccaaaacatcagcatcaagtccgaaccgatttcacctcctcgggatcgtatgaccccatcgggcttccagcagcagcagcagcagcagcagcagcagcagccgccgccaccaccgcagccccagccacaacccccgcagccccagccccgacaggaaatggggcgctcccctgtggacagtctgagcagctctagtagctcctatgatggcagtgatcgggaggatccacggggcgacttccattctccaattgtgcttggccgacccccaaacactgaggacagagaaagcccttctgtaaagcgaatgaggatggacgcgtgggtgacctaa

SEQ ID NO: 70 - DNA, 675 bp, Homo sapiens
  source 1..675: mol_type = genomic DNA
atggagctgtatgagacatccccctacttctaccaggaaccccgcttctatgatggggaaaactacctgcctgtccacctccagggcttcgaaccaccaggctacgagcggacggagctcaccctgagccccgaggccccagggccccttgaggacaaggggctggggacccccgagcactgtccaggccagtgcctgccgtgggcgtgtaaggtgtgtaagaggaagtcggtgtccgtggaccggcggcgggcggccacactgagggagaagcgcaggctcaagaaggtgaatgaggccttcgaggccctgaagagaagcaccctgctcaaccccaaccagcggctgcccaaggtggagatcctgcgcagtgccatccagtacatcgagcgcctccaggccctgctcagctccctcaaccaggaggagcgtgacctccgctaccggggcgggggcgggccccagccaggggtgcccagcgaatgcagctctcacagcgcctcctgcagtccagagtggggcagtgcactggagttcagcgccaacccaggggatcatctgctcacggctgaccctacagatgcccacaacctgcactccctcacctccatcgtggacagcatcacagtggaagatgtgtctgtggccttcccagatgaaaccatgcccaactga

SEQ ID NO: 71 - DNA, 822 bp, Homo sapiens
  source 1..822: mol_type = genomic DNA
atgtcgctgaccaacacaaagacggggttttcggtcaaggacatcttagacctgccggacaccaacgatgaggagggctctgtggccgaaggtccggaggaagagaacgaggggcccgagccagccaagagggccgggccgctggggcagggcgccctggacgcggtgcagagcctgcccctgaagaaccccttctacgacagcagcgacaacccgtacacgcgctggctggccagcaccgagggccttcagtactccctgcacggtctggctgccggggcgccccctcaggactcaagctccaagtccccggagccctcggccgacgagtcaccggacaatgacaaggagaccccgggcggcgggggggacgccggcaagaagcgaaagcggcgagtgcttttctccaaggcgcagacctacgagctggagcggcgctttcggcagcagcggtacctgtcggcgcccgagcgcgaacacctggccagcctcatccgcctcacgcccacgcaggtcaagatctggttccagaaccaccgctacaagatgaagcgcgcccgggccgagaaaggtatggaggtgacgcccctgccctcgccgcgccgggtggccgtgcccgtcttggtcagggacggcaaaccatgtcacgcgctcaaagcccaggacctggcagccgccaccttccaggcgggcattcccttttctgcctacagcgcgcagtcgctgcagcacatgcagtacaacgcccagtacagctcggccagcaccccccagtacccgacagcacaccccctggtccaggcccagcagtggacttggtga

SEQ ID NO: 72 - DNA, 7668 bp, Homo sapiens
  source 1..7668: mol_type = genomic DNA
atgccgccgctcctggcgcccctgctctgcctggcgctgctgcccgcgctcgccgcacgaggcccgcgatgctcccagcccggtgagacctgcctgaatggcgggaagtgtgaagcggccaatggcacggaggcctgcgtctgtggcggggccttcgtgggcccgcgatgccaggaccccaacccgtgcctcagcaccccctgcaagaacgccgggacatgccacgtggtggaccgcagaggcgtggcagactatgcctgcagctgtgccctgggcttctctgggcccctctgcctgacacccctggacaatgcctgcctcaccaacccctgccgcaacgggggcacctgcgacctgctcacgctgacggagtacaagtgccgctgcccgcccggctggtcagggaaatcgtgccagcaggctgacccgtgcgcctccaacccctgcgccaacggtggccagtgcctgcccttcgaggcctcctacatctgccactgcccacccagcttccatggccccacctgccggcaggatgtcaacgagtgtggccagaagcccgggctttgccgccacggaggcacctgccacaacgaggtcggctcctaccgctgcgtctgccgcgccacccacactggccccaactgcgagcggccctacgtgccctgcagcccctcgccctgccagaacgggggcacctgccgccccacgggcgacgtcacccacgagtgtgcctgcctgccaggcttcaccggccagaactgtgaggaaaatatcgacgattgtccaggaaacaactgcaagaacgggggtgcctgtgtggacggcgtgaacacctacaactgccgctgcccgccagagtggacaggtcagtactgtaccgaggatgtggacgagtgccagctgatgccaaatgcctgccagaacggcgggacctgccacaacacccacggtggctacaactgcgtgtgtgtcaacggctggactggtgaggactgcagcgagaacattgatgactgtgccagcgccgcctgcttccacggcgccacctgccatgaccgtgtggcctccttctactgcgagtgtccccatggccgcacaggtctgctgtgccacctcaacgacgcatgcatcagcaacccctgtaacgagggctccaactgcgacaccaaccctgtcaatggcaaggccatctgcacctgcccctcggggtacacgggcccggcctgcagccaggacgtggatgagtgctcgctgggtgccaacccctgcgagcatgcgggcaagtgcatcaacacgctgggctccttcgagtgccagtgtctgcagggctacacgggcccccgatgcgagatcgacgtcaacgagtgcgtctcgaacccgtgccagaacgacgccacctgcctggaccagattggggagttccagtgcatctgcatgcccggctacgagggtgtgcactgcgaggtcaacacagacgagtgtgccagcagcccctgcctgcacaatggccgctgcctggacaagatcaatgagttccagtgcgagtgccccacgggcttcactgggcatctgtgccagtacgatgtggacgagtgtgccagcaccccctgcaagaatggtgccaagtgcctggacggacccaacacttacacctgtgtgtgcacggaagggtacacggggacgcactgcgaggtggacatcgatgagtgcgaccccgacccctgccactacggctcctgcaaggacggcgtcgccaccttcacctgcctctgccgcccaggctacacgggccaccactgcgagaccaacatcaacgagtgctccagccagccctgccgccacgggggcacctgccaggaccgcgacaacgcctacctctgcttctgcctgaaggggaccacaggacccaactgcgagatcaacctggatgactgtgccagcagcccctgcgactcgggcacctgtctggacaagatcgatggctacgagtgtgcctgtgagccgggctacacagggagcatgtgtaacatcaacatcgatgagtgtgcgggcaacccctgccacaacgggggcacctgcgaggacggcatcaatggcttcacctgccgctgccccgagggctaccacgaccccacctgcctgtctgaggtcaatgagtgcaacagcaacccctgcgtccacggggcctgccgggacagcctcaacgggtacaagtgcgactgtgaccctgggtggagtgggaccaactgtgacatcaacaacaatgagtgtgaatccaacccttgtgtcaacggcggcacctgcaaagacatgaccagtggctacgtgtgcacctgccgggagggcttcagcggtcccaactgccagaccaacatcaacgagtgtgcgtccaacccatgtctgaaccagggcacgtgtattgacgacgttgccgggtacaagtgcaactgcctgctgccctacacaggtgccacgtgtgaggtggtgctggccccgtgtgcccccagcccctgcagaaacggcggggagtgcaggcaatccgaggactatgagagcttctcctgtgtctgccccacgggctggcaagggcagacctgtgaggtcgacatcaacgagtgcgttctgagcccgtgccggcacggcgcatcctgccagaacacccacggcggctaccgctgccactgccaggccggctacagtgggcgcaactgcgagaccgacatcgacgactgccggcccaacccgtgtcacaacgggggctcctgcacagacggcatcaacacggccttctgcgactgcctgcccggcttccggggcactttctgtgaggaggacatcaacgagtgtgccagtgacccctgccgcaacggggccaactgcacggactgcgtggacagctacacgtgcacctgccccgcaggcttcagcgggatccactgtgagaacaacacgcctgactgcacagagagctcctgcttcaacggtggcacctgcgtggacggcatcaactcgttcacctgcctgtgtccacccggcttcacgggcagctactgccagcacgatgtcaatgagtgcgactcacagccctgcctgcatggcggcacctgtcaggacggctgcggctcctacaggtgcacctgcccccagggctacactggccccaactgccagaaccttgtgcactggtgtgactcctcgccctgcaagaacggcggcaaatgctggcagacccacacccagtaccgctgcgagtgccccagcggctggaccggcctttactgcgacgtgcccagcgtgtcctgtgaggtggctgcgcagcgacaaggtgttgacgttgcccgcctgtgccagcatggagggctctgtgtggacgcgggcaacacgcaccactgccgctgccaggcgggctacacaggcagctactgtgaggacctggtggacgagtgctcacccagcccctgccagaacggggccacctgcacggactacctgggcggctactcctgcaagtgcgtggccggctaccacggggtgaactgctctgaggagatcgacgagtgcctctcccacccctgccagaacgggggcacctgcctcgacctccccaacacctacaagtgctcctgcccacggggcactcagggtgtgcactgtgagatcaacgtggacgactgcaatccccccgttgaccccgtgtcccggagccccaagtgctttaacaacggcacctgcgtggaccaggtgggcggctacagctgcacctgcccgccgggcttcgtgggtgagcgctgtgagggggatgtcaacgagtgcctgtccaatccctgcgacgcccgtggcacccagaactgcgtgcagcgcgtcaatgacttccactgcgagtgccgtgctggtcacaccgggcgccgctgcgagtccgtcatcaatggctgcaaaggcaagccctgcaagaatgggggcacctgcgccgtggcctccaacaccgcccgcgggttcatctgcaagtgccctgcgggcttcgagggcgccacgtgtgagaatgacgctcgtacctgcggcagcctgcgctgcctcaacggcggcacatgcatctccggcccgcgcagccccacctgcctgtgcctgggccccttcacgggccccgaatgccagttcccggccagcagcccctgcctgggcggcaacccctgctacaaccaggggacctgtgagcccacatccgagagccccttctaccgttgcctgtgccccgccaaattcaacgggctcttgtgccacatcctggactacagcttcgggggtggggccgggcgcgacatccccccgccgctgatcgaggaggcgtgcgagctgcccgagtgccaggaggacgcgggcaacaaggtctgcagcctgcagtgcaacaaccacgcgtgcggctgggacggcggtgactgctccctcaacttcaatgacccctggaagaactgcacgcagtctctgcagtgctggaagtacttcagtgacggccactgtgacagccagtgcaactcagccggctgcctcttcgacggctttgactgccagcgtgcggaaggccagtgcaaccccctgtacgaccagtactgcaaggaccacttcagcgacgggcactgcgaccagggctgcaacagcgcggagtgcgagtgggacgggctggactgtgcggagcatgtacccgagaggctggcggccggcacgctggtggtggtggtgctgatgccgccggagcagctgcgcaacagctccttccacttcctgcgggagctcagccgcgtgctgcacaccaacgtggtcttcaagcgtgacgcacacggccagcagatgatcttcccctactacggccgcgaggaggagctgcgcaagcaccccatcaagcgtgccgccgagggctgggccgcacctgacgccctgctgggccaggtgaaggcctcgctgctccctggtggcagcgagggtgggcggcggcggagggagctggaccccatggacgtccgcggctccatcgtctacctggagattgacaaccggcagtgtgtgcaggcctcctcgcagtgcttccagagtgccaccgacgtggccgcattcctgggagcgctcgcctcgctgggcagcctcaacatcccctacaagatcgaggccgtgcagagtgagaccgtggagccgcccccgccggcgcagctgcacttcatgtacgtggcggcggccgcctttgtgcttctgttcttcgtgggctgcggggtgctgctgtcccgcaagcgccggcggcagcatggccagctctggttccctgagggcttcaaagtgtctgaggccagcaagaagaagcggcgggagcccctcggcgaggactccgtgggcctcaagcccctgaagaacgcttcagacggtgccctcatggacgacaaccagaatgagtggggggacgaggacctggagaccaagaagttccggttcgaggagcccgtggttctgcctgacctggacgaccagacagaccaccggcagtggactcagcagcacctggatgccgctgacctgcgcatgtctgccatggcccccacaccgccccagggtgaggttgacgccgactgcatggacgtcaatgtccgcgggcctgatggcttcaccccgctcatgatcgcctcctgcagcgggggcggcctggagacgggcaacagcgaggaagaggaggacgcgccggccgtcatctccgacttcatctaccagggcgccagcctgcacaaccagacagaccgcacgggcgagaccgccttgcacctggccgcccgctactcacgctctgatgccgccaagcgcctgctggaggccagcgcagatgccaacatccaggacaacatgggccgcaccccgctgcatgcggctgtgtctgccgacgcacaaggtgtcttccagatcctgatccggaaccgagccacagacctggatgcccgcatgcatgatggcacgacgccactgatcctggctgcccgcctggccgtggagggcatgctggaggacctcatcaactcacacgccgacgtcaacgccgtagatgacctgggcaagtccgccctgcactgggccgccgccgtgaacaatgtggatgccgcagttgtgctcctgaagaacggggctaacaaagatatgcagaacaacagggaggagacacccctgtttctggccgcccgggagggcagctacgagaccgccaaggtgctgctggaccactttgccaaccgggacatcacggatcatatggaccgcctgccgcgcgacatcgcacaggagcgcatgcatcacgacatcgtgaggctgctggacgagtacaacctggtgcgcagcccgcagctgcacggagccccgctggggggcacgcccaccctgtcgcccccgctctgctcgcccaacggctacctgggcagcctcaagcccggcgtgcagggcaagaaggtccgcaagcccagcagcaaaggcctggcctgtggaagcaaggaggccaaggacctcaaggcacggaggaagaagtcccaggacggcaagggctgcctgctggacagctccggcatgctctcgcccgtggactccctggagtcaccccatggctacctgtcagacgtggcctcgccgccactgctgccctccccgttccagcagtctccgtccgtgcccctcaaccacctgcctgggatgcccgacacccacctgggcatcgggcacctgaacgtggcggccaagcccgagatggcggcgctgggtgggggcggccggctggcctttgagactggcccacctcgtctctcccacctgcctgtggcctctggcaccagcaccgtcctgggctccagcagcggaggggccctgaatttcactgtgggcgggtccaccagtttgaatggtcaatgcgagtggctgtcccggctgcagagcggcatggtgccgaaccaatacaaccctctgcgggggagtgtggcaccaggccccctgagcacacaggccccctccctgcagcatggcatggtaggcccgctgcacagtagccttgctgccagcgccctgtcccagatgatgagctaccagggcctgcccagcacccggctggccacccagcctcacctggtgcagacccagcaggtgcagccacaaaacttacagatgcagcagcagaacctgcagccagcaaacatccagcagcagcaaagcctgcagccgccaccaccaccaccacagccgcaccttggcgtgagctcagcagccagcggccacctgggccggagcttcctgagtggagagccgagccaggcagacgtgcagccactgggccccagcagcctggcggtgcacactattctgccccaggagagccccgccctgcccacgtcgctgccatcctcgctggtcccacccgtgaccgcagcccagttcctgacgcccccctcgcagcacagctactcctcgcctgtggacaacacccccagccaccagctacaggtgcctgagcaccccttcctcaccccgtcccctgagtcccctgaccagtggtccagctcgtccccgcattccaacgtctccgactggtccgagggcgtctccagccctcccaccagcatgcagtcccagatcgcccgcattccggaggccttcaagtaa

SEQ ID NO: 73 - DNA, 6966 bp, Homo sapiens
  source 1..6966: mol_type = genomic DNA
atggggccgggggcccgtggccgccgccgccgccgtcgcccgatgtcgccgccaccgccaccgccacccgtgcgggcgctgcccctgctgctgctgctagcggggccgggggctgcagcccccccttgcctggacggaagcccgtgtgcaaatggaggtcgttgcacccagctgccctcccgggaggctgcctgcctgtgcccgcctggctgggtgggtgagcggtgtcagctggaggacccctgtcactcaggcccctgtgctggccgtggtgtctgccagagttcagtggtggctggcaccgcccgattctcatgccggtgcccccgtggcttccgaggccctgactgctccctgccagatccctgcctcagcagcccttgtgcccacggtgcccgctgctcagtggggcccgatggacgcttcctctgctcctgcccacctggctaccagggccgcagctgccgaagcgacgtggatgagtgccgggtgggtgagccctgccgccatggtggcacctgcctcaacacacctggctccttccgctgccagtgtccagctggctacacagggccactatgtgagaaccccgcggtgccctgtgcaccctcaccatgccgtaacgggggcacctgcaggcagagtggcgacctcacttacgactgtgcctgtcttcctgggtttgagggtcagaattgtgaagtgaacgtggacgactgtccaggacaccgatgtctcaatggggggacatgcgtggatggcgtcaacacctataactgccagtgccctcctgagtggacaggccagttctgcacggaggacgtggatgagtgtcagctgcagcccaacgcctgccacaatgggggtacctgcttcaacacgctgggtggccacagctgcgtgtgtgtcaatggctggacaggcgagagctgcagtcagaatatcgatgactgtgccacagccgtgtgcttccatggggccacctgccatgaccgcgtggcttctttctactgtgcctgccccatgggcaagactggcctcctgtgtcacctggatgacgcctgtgtcagcaacccctgccacgaggatgctatctgtgacacaaatccggtgaacggccgggccatttgcacctgtcctcccggcttcacgggtggggcatgtgaccaggatgtggacgagtgctctatcggcgccaacccctgcgagcacttgggcaggtgcgtgaacacgcagggctccttcctgtgccagtgcggtcgtggctacactggacctcgctgtgagaccgatgtcaacgagtgtctgtcggggccctgccgaaaccaggccacgtgcctcgaccgcataggccagttcacctgtatctgtatggcaggcttcacaggaacctattgcgaggtggacattgacgagtgtcagagtagcccctgtgtcaacggtggggtctgcaaggaccgagtcaatggcttcagctgcacctgcccctcgggcttcagcggctccacgtgtcagctggacgtggacgaatgcgccagcacgccctgcaggaatggcgccaaatgcgtggaccagcccgatggctacgagtgccgctgtgccgagggctttgagggcacgctgtgtgatcgcaacgtggacgactgctcccctgacccatgccaccatggtcgctgcgtggatggcatcgccagcttctcatgtgcctgtgctcctggctacacgggcacacgctgcgagagccaggtggacgaatgccgcagccagccctgccgccatggcggcaaatgcctagacctggtggacaagtacctctgccgctgcccttctgggaccacaggtgtgaactgcgaagtgaacattgacgactgtgccagcaacccctgcacctttggagtctgccgtgatggcatcaaccgctacgactgtgtctgccaacctggcttcacagggcccctttgtaacgtggagatcaatgagtgtgcttccagcccatgcggcgagggaggttcctgtgtggatggggaaaatggcttccgctgcctctgcccgcctggctccttgcccccactctgcctccccccgagccatccctgtgcccatgagccctgcagtcacggcatctgctatgatgcacctggcgggttccgctgtgtgtgtgagcctggctggagtggcccccgctgcagccagagcctggcccgagacgcctgtgagtcccagccgtgcagggccggtgggacatgcagcagcgatggaatgggtttccactgcacctgcccgcctggtgtccagggacgtcagtgtgaactcctctccccctgcaccccgaacccctgtgagcatgggggccgctgcgagtctgcccctggccagctgcctgtctgctcctgcccccagggctggcaaggcccacgatgccagcaggatgtggacgagtgtgctggccccgcaccctgtggccctcatggtatctgcaccaacctggcagggagtttcagctgcacctgccatggagggtacactggcccttcctgcgatcaggacatcaatgactgtgaccccaacccatgcctgaacggtggctcgtgccaagacggcgtgggctccttttcctgctcctgcctccctggtttcgccggcccacgatgcgcccgcgatgtggatgagtgcctgagcaacccctgcggcccgggcacctgtaccgaccacgtggcctccttcacctgcacctgcccgccaggctacggaggcttccactgcgaacaggacctgcccgactgcagccccagctcctgcttcaatggcgggacctgtgtggacggcgtgaactcgttcagctgcctgtgccgtcccggctacacaggagcccactgccaacatgaggcagacccctgcctctcgcggccctgcctacacgggggcgtctgcagcgccgcccaccctggcttccgctgcacctgcctcgagagcttcacgggcccgcagtgccagacgctggtggattggtgcagccgccagccttgtcaaaacgggggtcgctgcgtccagactggggcctattgcctttgtccccctggatggagcggacgcctctgtgacatccgaagcttgccctgcagggaggccgcagcccagatcggggtgcggctggagcagctgtgtcaggcgggtgggcagtgtgtggatgaagacagctcccactactgcgtgtgcccagagggccgtactggtagccactgtgagcaggaggtggacccctgcttggcccagccctgccagcatggggggacctgccgtggctatatggggggctacatgtgtgagtgtcttcctggctacaatggtgataactgtgaggacgacgtggacgagtgtgcctcccagccctgccagcacgggggttcatgcattgacctcgtggcccgctatctctgctcctgtcccccaggaacgctgggggtgctctgcgagattaatgaggatgactgcggcccaggcccaccgctggactcagggccccggtgcctacacaatggcacctgcgtggacctggtgggtggtttccgctgcacctgtcccccaggatacactggtttgcgctgcgaggcagacatcaatgagtgtcgctcaggtgcctgccacgcggcacacacccgggactgcctgcaggacccaggcggaggtttccgttgcctttgtcatgctggcttctcaggtcctcgctgtcagactgtcctgtctccctgcgagtcccagccatgccagcatggaggccagtgccgtcctagcccgggtcctgggggtgggctgaccttcacctgtcactgtgcccagccgttctggggtccgcgttgcgagcgggtggcgcgctcctgccgggagctgcagtgcccggtgggcgtcccatgccagcagacgccccgcgggccgcgctgcgcctgccccccagggttgtcgggaccctcctgccgcagcttcccggggtcgccgccgggggccagcaacgccagctgcgcggccgccccctgtctccacgggggctcctgccgccccgcgccgctcgcgcccttcttccgctgcgcttgcgcgcagggctggaccgggccgcgctgcgaggcgcccgccgcggcacccgaggtctcggaggagccgcggtgcccgcgcgccgcctgccaggccaagcgcggggaccagcgctgcgaccgcgagtgcaacagcccaggctgcggctgggacggcggcgactgctcgctgagcgtgggcgacccctggcggcaatgcgaggcgctgcagtgctggcgcctcttcaacaacagccgctgcgaccccgcctgcagctcgcccgcctgcctctacgacaacttcgactgccacgccggtggccgcgagcgcacttgcaacccggtgtacgagaagtactgcgccgaccactttgccgacggccgctgcgaccagggctgcaacacggaggagtgcggctgggatgggctggattgtgccagcgaggtgccggccctgctggcccgcggcgtgctggtgctcacagtgctgctgccgccagaggagctactgcgttccagcgccgactttctgcagcggctcagcgccatcctgcgcacctcgctgcgcttccgcctggacgcgcacggccaggccatggtcttcccttaccaccggcctagtcctggctccgaaccccgggcccgtcgggagctggcccccgaggtgatcggctcggtagtaatgctggagattgacaaccggctctgcctgcagtcgcctgagaatgatcactgcttccccgatgcccagagcgccgctgactacctgggagcgttgtcagcggtggagcgcctggacttcccgtacccactgcgggacgtgcggggggagccgctggagcctccagaacccagcgtcccgctgctgccactgctagtggcgggcgctgtcttgctgctggtcattctcgtcctgggtgtcatggtggcccggcgcaagcgcgagcacagcaccctctggttccctgagggcttctcactgcacaaggacgtggcctctggtcacaagggccggcgggaacccgtgggccaggacgcgctgggcatgaagaacatggccaagggtgagagcctgatgggggaggtggccacagactggatggacacagagtgcccagaggccaagcggctaaaggtagaggagccaggcatgggggctgaggaggctgtggattgccgtcagtggactcaacaccatctggttgctgctgacatccgcgtggcaccagccatggcactgacaccaccacagggcgacgcagatgctgatggcatggatgtcaatgtgcgtggcccagatggcttcaccccgctaatgctggcttccttctgtgggggggctctggagccaatgccaactgaagaggatgaggcagatgacacatcagctagcatcatctccgacctgatctgccagggggctcagcttggggcacggactgaccgtactggcgagactgctttgcacctggctgcccgttatgcccgtgctgatgcagccaagcggctgctggatgctggggcagacaccaatgcccaggaccactcaggccgcactcccctgcacacagctgtcacagccgatgcccagggtgtcttccagattctcatccgaaaccgctctacagacttggatgcccgcatggcagatggctcaacggcactgatcctggcggcccgcctggcagtagagggcatggtggaagagctcatcgccagccatgctgatgtcaatgctgtggatgagcttgggaaatcagccttacactgggctgcggctgtgaacaacgtggaagccactttggccctgctcaaaaatggagccaataaggacatgcaggatagcaaggaggagacccccctattcctggccgcccgcgagggcagctatgaggctgccaagctgctgttggaccactttgccaaccgtgagatcaccgaccacctggacaggctgccgcgggacgtagcccaggagagactgcaccaggacatcgtgcgcttgctggatcaacccagtgggccccgcagcccccccggtccccacggcctggggcctctgctctgtcctccaggggccttcctccctggcctcaaagcggcacagtcggggtccaagaagagcaggaggccccccgggaaggcggggctggggccgcaggggccccgggggcggggcaagaagctgacgctggcctgcccgggccccctggctgacagctcggtcacgctgtcgcccgtggactcgctggactccccgcggcctttcggtgggccccctgcttcccctggtggcttcccccttgaggggccctatgcagctgccactgccactgcagtgtctctggcacagcttggtggcccaggccgggcgggtctagggcgccagccccctggaggatgtgtactcagcctgggcctgctgaaccctgtggctgtgcccctcgattgggcccggctgcccccacctgcccctccaggcccctcgttcctgctgccactggcgccgggaccccagctgctcaacccagggacccccgtctccccgcaggagcggcccccgccttacctggcagtcccaggacatggcgaggagtacccggcggctggggcacacagcagccccccaaaggcccgcttcctgcgggttcccagtgagcacccttacctgaccccatcccccgaatcccctgagcactgggccagcccctcacctccctccctctcagactggtccgaatccacgcctagcccagccactgccactggggccatggccaccaccactggggcactgcctgcccagccacttcccttgtctgttcccagctcccttgctcaggcccagacccagctggggccccagccggaagttacccccaagaggcaagtgttggcctga

SEQ ID NO: 74 - DNA, 1797 bp, Homo sapiens
  source 1..1797: mol_type = genomic DNA
atgccttgtgttcaggcgcagtatgggtcctcgcctcaaggagccagccccgcttctcagagctacagttaccactcttcgggagaatacagctccgatttcttaactccagagtttgtcaagtttagcatggacctcaccaacactgaaatcactgccaccacttctctccccagcttcagtacctttatggacaactacagcacaggctacgacgtcaagccaccttgcttgtaccaaatgcccctgtccggacagcagtcctccattaaggtagaagacattcagatgcacaactaccagcaacacagccacctgcccccccagtctgaggagatgatgccgcactccgggtcggtttactacaagccctcctcgcccccgacgcccaccaccccgggcttccaggtgcagcacagccccatgtgggacgacccgggatctctccacaacttccaccagaactacgtggccactacgcacatgatcgagcagaggaaaacgccagtctcccgcctctccctcttctcctttaagcaatcgccccctggcaccccggtgtctagttgccagatgcgcttcgacgggcccctgcacgtccccatgaacccggagcccgccggcagccaccacgtggtggacgggcagaccttcgctgtgcccaaccccattcgcaagcccgcgtccatgggcttcccgggcctgcagatcggccacgcgtctcagctgctcgacacgcaggtgccctcaccgccgtcgcggggctccccctccaacgaggggctgtgcgctgtgtgtggggacaacgcggcctgccaacactacggcgtgcgcacctgtgagggctgcaaaggcttctttaagcgcacagtgcaaaaaaatgcaaaatacgtgtgtttagcaaataaaaactgcccagtggacaagcgtcgccggaatcgctgtcagtactgccgatttcagaagtgcctggctgttgggatggtcaaagaagtggttcgcacagacagtttaaaaggccggagaggtcgtttgccctcgaaaccgaagagcccacaggagccctctcccccttcgcccccggtgagtctgatcagtgccctcgtcagggcccatgtcgactccaacccggctatgaccagcctggactattccaggttccaggcgaaccctgactatcaaatgagtggagatgacacccagcatatccagcaattctatgatctcctgactggctccatggagatcatccggggctgggcagagaagatccctggcttcgcagacctgcccaaagccgaccaagacctgctttttgaatcagctttcttagaactgtttgtccttcgattagcatacaggtccaacccagtggagggtaaactcatcttttgcaatggggtggtcttgcacaggttgcaatgcgttcgtggctttggggaatggattgattccattgttgaattctcctccaacttgcagaatatgaacatcgacatttctgccttctcctgcattgctgccctggctatggtcacagagagacacgggctcaaggaacccaagagagtggaagaactgcaaaacaagattgtaaattgtctcaaagaccacgtgactttcaacaatggggggttgaaccgccccaattatttgtccaaactgttggggaagctcccagaacttcgtaccctttgcacacaggggctacagcgcattttctacctgaaattggaagacttggtgccaccgccagcaataattgacaaacttttcctggacactttacctttctaa

SEQ ID NO: 75 - DNA, 1074 bp, Homo sapiens
  source 1..1074: mol_type = genomic DNA
atgcagagtgtgcagagcacgagcttttgtctccgaaagcagtgcctttgcctgaccttcctgcttctccatctcctgggacaggtcgctgcgactcagcgctgccctccccagtgcccgggccggtgccctgcgacgccgccgacctgcgcccccggggtgcgcgcggtgctggacggctgctcatgctgtctggtgtgtgcccgccagcgtggcgagagctgctcagatctggagccatgcgacgagagcagtggcctctactgtgatcgcagcgcggaccccagcaaccagactggcatctgcacggcggtagagggagataactgtgtgttcgatggggtcatctaccgcagtggagagaaatttcagccaagctgcaaattccagtgcacctgcagagatgggcagattggctgtgtgccccgctgtcagctggatgtgctactgcctgagcctaactgcccagctccaagaaaagttgaggtgcctggagagtgctgtgaaaagtggatctgtggcccagatgaggaggattcactgggaggccttacccttgcagcttacaggccagaagccaccctaggagtagaagtctctgactcaagtgtcaactgcattgaacagaccacagagtggacagcatgctccaagagctgtggtatggggttctccacccgggtcaccaataggaaccgtcaatgtgagatgctgaaacagactcggctctgcatggtgcggccctgtgaacaagagccagagcagccaacagataagaaaggaaaaaagtgtctccgcaccaagaagtcactcaaagccatccacctgcagttcaagaactgcaccagcctgcacacctacaagcccaggttctgtggggtctgcagtgatggccgctgctgcactccccacaataccaaaaccatccaggcagagtttcagtgctccccagggcaaatagtcaagaagccagtgatggtcattgggacctgcacctgtcacaccaactgtcctaagaacaatgaggccttcctccaggagctggagctgaagactaccagagggaaaatgtaa

SEQ ID NO: 76 - DNA, 768 bp, Homo sapiens
  source 1..768: mol_type = genomic DNA
atgctgcggccacagcggcccggagacttgcagctcggggcctccctctacgagctggtgggctacaggcagccgccctcctcctcctcctcctccacctcctccacctcctccacttcctcctcctccacgacggcccccctcctccccaaggctgcgcgcgagaagccggaggcgccggccgagcctccaggccccgggcccgggtcaggcgcgcacccgggcggcagcgcccggccggacgccaaggaggagcagcagcagcagctgcggcgcaagatcaacagccgcgagcggaagcgcatgcaggacctgaacctggccatggacgccctgcgcgaggtcatcctgccctactcagcggcgcactgccagggcgcgcccggccgcaagctctccaagatagccacgctgctgctcgcccgcaactacatcctactgctgggcagctcgctgcaggagctgcgccgcgcgctgggcgagggcgccgggcccgccgcgccgcgcctgctgctggccgggctgcccctgctcgccgccgcgcccggctccgtgttgctggcgcccggcgccgtaggaccccccgacgcgctgcgccccgccaagtacctgtcgctggcgctggacgagccgccgtgcggccagttcgctctccccggcggcggcgcaggcggccccggcctctgcacctgcgccgtgtgcaagttcccgcacctggtcccggccagcctgggcctggccgccgtgcaggcgcaattctccaagtga

SEQ ID NO: 77 - DNA, 972 bp, Homo sapiens
  source 1..972: mol_type = genomic DNA
atggactcggacgccagcctggtgtccagccgcccgtcgtcgccagagcccgatgacctttttctgccggcccggagtaagggcagcagcggcagcgccttcactgggggcaccgtgtcctcgtccaccccgagtgactgcccgccggagctgagcgccgagctgcgcggcgctatgggctctgcgggcgcgcatcctggggacaagctaggaggcagtggcttcaagtcatcctcgtccagcacctcgtcgtctacgtcgtcggcggctgcgtcgtccaccaagaaggacaagaagcaaatgacagagccggagctgcagcagctgcgtctcaagatcaacagccgcgagcgcaagcgcatgcacgacctcaacatcgccatggatggcctccgcgaggtcatgccgtacgcacacggcccttcggtgcgcaagctttccaagatcgccacgctgctgctggcgcgcaactacatcctcatgctcaccaactcgctggaggagatgaagcgactggtgagcgagatctacgggggccaccacgctggcttccacccgtcggcctgcggcggcctggcgcactccgcgcccctgcccgccgccaccgcgcacccggcagcagcagcgcacgccgcacatcaccccgcggtgcaccaccccatcctgccgcccgccgccgcagcggctgctgccgccgctgcagccgcggctgtgtccagcgcctctctgcccggatccgggctgccgtcggtcggctccatccgtccaccgcacggcctactcaagtctccgtctgctgccgcggccgccccgctggggggcgggggcggcggcagtggggcgagcgggggcttccagcactggggcggcatgccctgcccctgcagcatgtgccaggtgccgccgccgcaccaccacgtgtcggctatgggcgccggcagcctgccgcgcctcacctccgacgccaagtga

SEQ ID NO: 78 - DNA, 852 bp, Homo sapiens
  source 1..852: mol_type = genomic DNA
atgaacggcgaggagcagtactacgcggccacgcagctttacaaggacccatgcgcgttccagcgaggcccggcgccggagttcagcgccagcccccctgcgtgcctgtacatgggccgccagcccccgccgccgccgccgcacccgttccctggcgccctgggcgcgctggagcagggcagccccccggacatctccccgtacgaggtgccccccctcgccgacgaccccgcggtggcgcaccttcaccaccacctcccggctcagctcgcgctcccccacccgcccgccgggcccttcccggagggagccgagccgggcgtcctggaggagcccaaccgcgtccagctgcctttcccatggatgaagtctaccaaagctcacgcgtggaaaggccagtgggcaggcggcgcctacgctgcggagccggaggagaacaagcggacgcgcacggcctacacgcgcgcacagctgctagagctggagaaggagttcctattcaacaagtacatctcacggccgcgccgggtggagctggctgtcatgttgaacttgaccgagagacacatcaagatctggttccaaaaccgccgcatgaagtggaaaaaggaggaggacaagaagcgcggcggcgggacagctgtcgggggtggcggggtcgcggagcctgagcaggactgcgccgtgacctccggcgaggagcttctggcgctgccgccgccgccgccccccggaggtgctgtgccgcccgctgcccccgttgccgcccgagagggccgcctgccgcctggccttagcgcgtcgccacagccctccagcgtcgcgcctcggcggccgcaggaaccacgatga

SEQ ID NO: 79 - DNA, 717 bp, Homo sapiens
  source 1..717: mol_type = genomic DNA
atgagacagagcggcgcctcccagcccctgctgatcaacatgtacctgccagatcccgtcggagacggtctcttcaaggacgggaagaacccgagctgggggccgctgagccccgcggttcagaaaggcagcggacagatccagctgtggcagtttctgctggagctgctggctgaccgcgcgaacgccggctgcatcgcgtgggagggcggtcacggcgagttcaagctcacggacccggacgaggtggcgcggcggtggggcgagcgcaagagcaagcccaacatgaactacgacaagctgagccgcgccctgcgctactactacgacaagaacatcatgagcaaggtgcatggcaagcgctacgcctaccgcttcgacttccagggcctggcgcaggcctgccagccgccgcccgcgcacgctcatgccgccgccgcagctgctgccgccgccgcggccgcccaggacggcgcgctctacaagctgcccgccggcctcgccccgctgcccttccccggcctctccaaactcaacctcatggccgcctcggccggggtcgcgcccgccggcttctcctactggccgggcccgggccccgccgccaccgctgccgccgccaccgccgcgctctaccccagtcccagcttgcagcccccgcccgggcccttcggggccgtggccgcagcctcgcacttggggggccattaccactag

SEQ ID NO: 80 - DNA, 855 bp, Homo sapiens
  source 1..855: mol_type = genomic DNA
atggactactcctacctcaattcgtacgactcgtgcgtggcggccatggaggcgtccgcctacggcgactttggcgcctgcagccagcccggcggcttccaatacagccccctgcggcccgctttccccgcggcagggccgccctgccccgcgctcggctcctccaactgcgcacttggcgccctacgcgaccaccagcccgcgccctactcggcagtgccctacaagttcttcccagagccatccggcctgcacgagaagcgcaagcagcggcgcatccgcaccacgttcaccagcgcgcagctcaaggagctggagcgcgttttcgctgagacccactaccccgacatttacacgcgtgaggagctggcgctcaagatcgacctcactgaggctcgcgtgcaggtctggttccagaaccgccgggccaagttccgcaaacaggagcgcgcggccagcgccaagggcgcggcgggcgcggcgggcgccaaaaagggcgaggcgcgctgctcctccgaggacgacgattccaaggagtccacgtgcagccccacgcccgatagcaccgcctcgctgccgccgccgcctgcgcccggcctggccagcccgcgcctgagccccagcccgctgcccgtcgcactgggctccgggccgggacctgggccggggccacagccgctcaagggcgcactgtgggccggtgtggcgggcggtgggggcggcgggcctggcgcgggagcggccgaactacttaaggcttggcagccggcggagtccggccccgggcccttctccggggttctgtcctcctttcaccggaagcccggccccgccctgaagaccaatctcttctag

SEQ ID NO: 81 - DNA, 945 bp, Homo sapiens
  source 1..945: mol_type = genomic DNA
atgtataaaatggaatattcttacctcaattcctctgcctacgagtcctgtatggctgggatggacacctcgagcctggcttcagcctatgctgacttcagttcctgcagccaggccagtggcttccagtataacccgataaggaccacttttggggccacgtccggctgcccttccctcacgccgggatcctgcagcctgggcaccctcagggaccaccagagcagtccgtacgccgcagttccttacaaactcttcacggaccacggcggcctcaacgagaagcgcaagcagcggcgcatccgcaccactttcaccagtgcccagctcaaagagctggaaagggtcttcgcggagactcactaccccgacatctacactcgggaggagctggccctgaagatcgacctcacagaggcgcgagtccaggtgtggttccagaaccgccgcgccaagtttcgcaagcaggagcgcgcagcggcagccgcagcggccgcggccaagaacggctcctcgggcaaaaagtctgactcttccagggacgacgagagcaaagaggccaagagcactgacccggacagcactgggggcccaggtcccaatcccaaccccacccccagctgcggggcgaatggaggcggcggcggcgggcccagcccggctggagctccgggggcggcggggcccgggggcccgggaggcgaacccggcaagggcggcgcagcagcagcggcggcggccgcggcagcggcggcggcggcagcggcagcggcggcagctggaggcctggctgcggctgggggccctggacaaggctgggctcccggccccggccccatcacctccatcccggattcgcttgggggtcccttcgccagcgtcctatcttcgctccaaagacccaacggtgccaaagccgccttagtgaagagcagtatgttctga

SEQ ID NO: 82 - DNA, 876 bp, Homo sapiens
  source 1..876: mol_type = genomic DNA
atgagttgccaagcttttacttcggctgatacctttatacctctgaattctgacgcctctgcaactctgcctctgataatgcatcacagtgctgccgagtgtctaccagtctccaaccatgccaccaatgtgatgtctacagcaacaggacttcattattctgttccttcctgtcattatggaaaccagccatcaacctatggagtgatggcaggtagtttaaccccttgtctttataaatttcctgaccacaccttgagtcatggatttcctcctatacaccagcctcttctggcagaggaccccacagctgctgatttcaagcaggaactcaggcggaaaagtaaattggtggaagagccaatagacatggattctccagaaatcagagaacttgaaaagtttgccaatgaatttaaagtgagacgaattaaattaggatacacccagacaaatgttggggaggccctggcagctgtgcatggctctgaattcagtcaaacaacaatctgccgatttgaaaatctgcagctcagctttaaaaatgcatgcaaactgaaagcaatattatccaaatggctggaggaagctgagcaagtaggagctttgtacaatgaaaaagtgggagcaaatgaaaggaaaagaaaacgaagaacaactataagcattgctgctaaagatgctctggagagacactttggagaacagaataaaccttcttctcaagagatcatgaggatggctgaagaactgaatctggagaaagaagtagtaagagtttggttttgcaaccggaggcagagagaaaaacgggtgaaaacaagtctgaatcagagtttattttctatttctaaggaacatcttgagtgcagataa

SEQ ID NO: 83 - DNA, 909 bp, Homo sapiens
  source 1..909: mol_type = genomic DNA
atggagttcggcctgctcagcgaggcagaggcccggagccctgccctgtcgctgtcagacgctggcactccgcacccccagctcccagagcacggctgcaagggccaggagcacagcgactcagaaaaggcctcggcttcgctgcccggcggctccccagaggacggttcgctgaaaaagaagcagcggcggcagcgcacgcacttcaccagccagcagctacaggagctagaggcgaccttccagaggaaccgctaccccgacatgagcacgcgcgaggagatcgccgtgtggaccaacctcaccgaggcccgcgtgcgggtgtggttcaagaaccggcgcgccaaatggcggaagcgcgagcgcagccagcaggccgagctatgcaaaggcagcttcgcggcgccgctcggggggctggtgccgccctacgaggaggtgtaccccggctactcgtacggcaactggccgcccaaggctcttgccccgccgctcgccgccaagacctttccattcgccttcaactcggtcaacgtggggcctctggcttcgcagcccgtcttctcgccacccagctccatcgccgcctccatggtgccctccgccgcggctgccccgggcaccgtgccagggcctggggccctgcagggcctgggcgggggcccccccgggctggctccggccgccgtgtcctccggggccgtgtcctgcccttatgcctcggccgccgccgccgccgcggctgccgcctcttccccctacgtctatcgggacccgtgtaactcgagcctggccagcctgcggctcaaagccaaacagcacgcctccttcagctaccccgctgtgcacgggccgcccccggcagccaaccttagtccgtgccagtacgccgtggaaaggcccgtatga

SEQ ID NO: 84 - DNA, 1362 bp, Homo sapiens
  source 1..1362: mol_type = genomic DNA
atgcgtatccccgtagatgccagcacgagccgccgcttcacgccgccttccaccgcgctgagcccaggcaagatgagcgaggcgttgccgctgggcgccccggacgccggcgctgccctggccggcaagctgaggagcggcgaccgcagcatggtggaggtgctggccgaccacccgggcgagctggtgcgcaccgacagccccaacttcctctgctccgtgctgcctacgcactggcgctgcaacaagaccctgcccatcgctttcaaggtggtggccctaggggatgttccagatggcactctggtcactgtgatggctggcaatgatgaaaactactcggctgagctgagaaatgctaccgcagccatgaagaaccaggttgcaagatttaatgacctcaggtttgtcggtcgaagtggaagagggaaaagcttcactctgaccatcactgtcttcacaaacccaccgcaagtcgccacctaccacagagccatcaaaatcacagtggatgggccccgagaacctcgaagacatcggcagaaactagatgatcagaccaagcccgggagcttgtccttttccgagcggctcagtgaactggagcagctgcggcgcacagccatgagggtcagcccacaccacccagcccccacgcccaaccctcgtgcctccctgaaccactccactgcctttaaccctcagcctcagagtcagatgcaggatacaaggcagatccaaccatccccaccgtggtcctacgatcagtcctaccaatacctgggatccattgcctctccttctgtgcacccagcaacgcccatttcacctggacgtgccagcggcatgacaaccctctctgcagaactttccagtcgactctcaacggcacccgacctgacagcgttcagcgacccgcgccagttccccgcgctgccctccatctccgacccccgcatgcactatccaggcgccttcacctactccccgacgccggtcacctcgggcatcggcatcggcatgtcggccatgggctcggccacgcgctaccacacctacctgccgccgccctaccccggctcgtcgcaagcgcagggaggcccgttccaagccagctcgccctcctaccacctgtactacggcgcctcggccggctcctaccagttctccatggtgggcggcgagcgctcgccgccgcgcatcctgccgccctgcaccaacgcctccaccggctccgcgctgctcaaccccagcctcccgaaccagagcgacgtggtggaggccgagggcagccacagcaactcccccaccaacatggcgccctccgcgcgcctggaggaggccgtgtggaggccctactga

SEQ ID NO: 85 - DNA, 1704 bp, Homo sapiens
  source 1..1704: mol_type = genomic DNA
atgcttcattcgcctcacaaacaaccacagaaccacaagtgcggtgcaaactttctccaggaggacagcaagaagtctctggtttttaaatggttaatctccgcaggtcactaccagccaccgagaccaacagagtcatttaaggctgcaagcagtatttacaacagagggtacaagttctatctgaaaaaaaaaggagggactatggcatcaaacagcctcttcagcacagtgacaccatgtcagcaaaacttcttttgggatccgagcaccagccggcgcttcagccccccctccagcagcctgcagcccggcaaaatgagcgacgtgagcccggtggtggctgcgcaacagcagcagcaacagcagcagcagcaacagcagcagcagcagcagcaacagcagcagcagcagcaggaggcggcggcggcggctgcggcggcggcggcggctgcggcggcggcagctgcagtgccccggttgcggccgccccacgacaaccgcaccatggtggagatcatcgccgaccacccggccgaactcgtccgcaccgacagccccaacttcctgtgctcggtgctgccctcgcactggcgctgcaacaagaccctgcccgtggccttcaaggtggtagccctcggagaggtaccagatgggactgtggttactgtcatggcgggtaacgatgaaaattattctgctgagctccggaatgcctctgctgttatgaaaaaccaagtagcaaggttcaacgatctgagatttgtgggccggagtggacgaggcaagagtttcaccttgaccataaccgtcttcacaaatcctccccaagtagctacctatcacagagcaattaaagttacagtagatggacctcgggaacccagaaggcacagacagaagcttgatgactctaaacctagtttgttctctgaccgcctcagtgatttagggcgcattcctcatcccagtatgagagtaggtgtcccgcctcagaacccacggccctccctgaactctgcaccaagtccttttaatccacaaggacagagtcagattacagaccccaggcaggcacagtcttccccgccgtggtcctatgaccagtcttacccctcctacctgagccagatgacgtccccgtccatccactctaccaccccgctgtcttccacacggggcactgggcttcctgccatcaccgatgtgcctaggcgcatttcaggtgcttcagaactgggccctttttcagaccccaggcagttcccaagcatttcatccctcactgagagccgcttctccaacccacgaatgcactatccagccacctttacttacaccccgccagtcacctcaggcatgtccctcggtatgtccgccaccactcactaccacacctacctgccaccaccctaccccggctcttcccaaagccagagtggacccttccagaccagcagcactccatatctctactatggcacttcgtcaggatcctatcagtttcccatggtgccggggggagaccggtctccttccagaatgcttccgccatgcaccaccacctcgaatggcagcacgctattaaatccaaatttgcctaaccagaatgatggtgttgacgctgatggaagccacagcagttccccaactgttttgaattctagtggcagaatggatgaatctgtttggcgaccatattga

SEQ ID NO: 86 - DNA, 1389 bp, Homo sapiens
  source 1..1389: mol_type = genomic DNA
atgctgctgctggcgagatgtctgctgctagtcctcgtctcctcgctgctggtatgctcgggactggcgtgcggaccgggcagggggttcgggaagaggaggcaccccaaaaagctgacccctttagcctacaagcagtttatccccaatgtggccgagaagaccctaggcgccagcggaaggtatgaagggaagatctccagaaactccgagcgatttaaggaactcacccccaattacaaccccgacatcatatttaaggatgaagaaaacaccggagcggacaggctgatgactcagaggtgtaaggacaagttgaacgctttggccatctcggtgatgaaccagtggccaggagtgaaactgcgggtgaccgagggctgggacgaagatggccaccactcagaggagtctctgcactacgagggccgcgcagtggacatcaccacgtctgaccgcgaccgcagcaagtacggcatgctggcccgcctggcggtggaggccggcttcgactgggtgtactacgagtccaaggcacatatccactgctcggtgaaagcagagaactcggtggcggccaaatcgggaggctgcttcccgggctcggccacggtgcacctggagcagggcggcaccaagctggtgaaggacctgagccccggggaccgcgtgctggcggcggacgaccagggccggctgctctacagcgacttcctcactttcctggaccgcgacgacggcgccaagaaggtcttctacgtgatcgagacgcgggagccgcgcgagcgcctgctgctcaccgccgcgcacctgctctttgtggcgccgcacaacgactcggccaccggggagcccgaggcgtcctcgggctcggggccgccttccgggggcgcactggggcctcgggcgctgttcgccagccgcgtgcgcccgggccagcgcgtgtacgtggtggccgagcgtgacggggaccgccggctcctgcccgccgctgtgcacagcgtgaccctaagcgaggaggccgcgggcgcctacgcgccgctcacggcccagggcaccattctcatcaaccgggtgctggcctcgtgctacgcggtcatcgaggagcacagctgggcgcaccgggccttcgcgcccttccgcctggcgcacgcgctcctggctgcactggcgcccgcgcgcacggaccgcggcggggacagcggcggcggggaccgcgggggcggcggcggcagagtagccctaaccgctccaggtgctgccgacgctccgggtgcgggggccaccgcgggcatccactggtactcgcagctgctctaccaaataggcacctggctcctggacagcgaggccctgcacccgctgggcatggcggtcaagtccagctga

SEQ ID NO: 87 - DNA, 1530 bp, Homo sapiens
  source 1..1530: mol_type = genomic DNA
atgaatctcctggaccccttcatgaagatgaccgacgagcaggagaagggcctgtccggcgcccccagccccaccatgtccgaggactccgcgggctcgccctgcccgtcgggctccggctcggacaccgagaacacgcggccccaggagaacacgttccccaagggcgagcccgatctgaagaaggagagcgaggaggacaagttccccgtgtgcatccgcgaggcggtcagccaggtgctcaaaggctacgactggacgctggtgcccatgccggtgcgcgtcaacggctccagcaagaacaagccgcacgtcaagcggcccatgaacgccttcatggtgtgggcgcaggcggcgcgcaggaagctcgcggaccagtacccgcacttgcacaacgccgagctcagcaagacgctgggcaagctctggagacttctgaacgagagcgagaagcggcccttcgtggaggaggcggagcggctgcgcgtgcagcacaagaaggaccacccggattacaagtaccagccgcggcggaggaagtcggtgaagaacgggcaggcggaggcagaggaggccacggagcagacgcacatctcccccaacgccatcttcaaggcgctgcaggccgactcgccacactcctcctccggcatgagcgaggtgcactcccccggcgagcactcggggcaatcccagggcccaccgaccccacccaccacccccaaaaccgacgtgcagccgggcaaggctgacctgaagcgagaggggcgccccttgccagaggggggcagacagccccctatcgacttccgcgacgtggacatcggcgagctgagcagcgacgtcatctccaacatcgagaccttcgatgtcaacgagtttgaccagtacctgccgcccaacggccacccgggggtgccggccacgcacggccaggtcacctacacgggcagctacggcatcagcagcaccgcggccaccccggcgagcgcgggccacgtgtggatgtccaagcagcaggcgccgccgccacccccgcagcagcccccacaggccccgccggccccgcaggcgcccccgcagccgcaggcggcgcccccacagcagccggcggcacccccgcagcagccacaggcgcacacgctgaccacgctgagcagcgagccgggccagtcccagcgaacgcacatcaagacggagcagctgagccccagccactacagcgagcagcagcagcactcgccccaacagatcgcctacagccccttcaacctcccacactacagcccctcctacccgcccatcacccgctcacagtacgactacaccgaccaccagaactccagctcctactacagccacgcggcaggccagggcaccggcctctactccaccttcacctacatgaaccccgctcagcgccccatgtacacccccatcgccgacacctctggggtcccttccatcccgcagacccacagcccccagcactgggaacaacccgtctacacacagctcactcgaccttga

SEQ ID NO: 88 - DNA, 1245 bp, Homo sapiens
  source 1..1245: mol_type = genomic DNA
atgagcagcccggatgcgggatacgccagtgacgaccagagccagacccagagcgcgctgcccgcggtgatggccgggctgggcccctgcccctgggccgagtcgctgagccccatcggggacatgaaggtgaagggcgaggcgccggcgaacagcggagcaccggccggggccgcgggccgagccaagggcgagtcccgtatccggcggccgatgaacgctttcatggtgtgggctaaggacgagcgcaagcggctggcgcagcagaatccagacctgcacaacgccgagttgagcaagatgctgggcaagtcgtggaaggcgctgacgctggcggagaagcggcccttcgtggaggaggcagagcggctgcgcgtgcagcacatgcaggaccaccccaactacaagtaccggccgcggcggcgcaagcaggtgaagcggctgaagcgggtggagggcggcttcctgcacggcctggctgagccgcaggcggccgcgctgggccccgagggcggccgcgtggccatggacggcctgggcctccagttccccgagcagggcttccccgccggcccgccgctgctgcctccgcacatgggcggccactaccgcgactgccagagtctgggcgcgcctccgctcgacggctacccgttgcccacgcccgacacgtccccgctggacggcgtggaccccgacccggctttcttcgccgccccgatgcccggggactgcccggcggccggcacctacagctacgcgcaggtctcggactacgctggccccccggagcctcccgccggtcccatgcacccccgactcggcccagagcccgcgggtccctcgattccgggcctcctggcgccacccagcgcccttcacgtgtactacggcgcgatgggctcgcccggggcgggcggcgggcgcggcttccagatgcagccgcaacaccagcaccagcaccagcaccagcaccaccccccgggccccggacagccgtcgccccctccggaggcactgccctgccgggacggcacggaccccagtcagcccgccgagctcctcggggaggtggaccgcacggaatttgaacagtatctgcacttcgtgtgcaagcctgagatgggcctcccctaccaggggcatgactccggtgtgaatctccccgacagccacggggccatttcctcggtggtgtccgacgccagctccgcggtatattactgcaactatcctgacgtgtga

SEQ ID NO: 89 - DNA, 987 bp, Homo sapiens
  source 1..987: mol_type = genomic DNA
atgactggagtctttgacagtctagtggctgatatgcactcgacccagatcgccgcctccagcacgtaccaccagcaccagcagcccccgagcggcggcggcgccggcccgggtggcaacagcagcagcagcagcagcctccacaagccccaggagtcgcccacccttccggtgtccaccgccaccgacagcagctactacaccaaccagcagcacccggcgggcggcggcggcggcgggggctcgccctacgcgcacatgggttcctaccagtaccaagccagcggcctcaacaacgtcccttactccgccaagagcagctatgacctgggctacaccgccgcctacacctcctacgctccctatggaaccagttcgtccccagccaacaacgagcctgagaaggaggaccttgagcctgaaattcggatagtgaacgggaagccaaagaaagtccggaaaccccgcaccatctactccagtttccagctggcggctcttcagcggcgtttccaaaagactcaatacttggccttgccggagcgagccgagctggcggcctctctgggcctcacccagactcaggtcaaaatctggttccagaaccgccggtccaagttcaagaagatgtggaaaagtggtgagatcccctcggagcagcaccctggggccagcgcttctccaccttgtgcttcgccgccagtctcagcgccggcctcctgggactttggtgtgccgcagcggatggcgggcggcggtggtccgggcagtggcggcagcggcgccggcagctcgggctccagcccgagcagcgcggcctcggcttttctgggcaactacccctggtaccaccagacctcgggatccgcctcacacctgcaggccacggcgccgctgctgcaccccactcagaccccgcagccgcatcaccaccaccaccatcacggcggcgggggcgccccggtgagcgcggggacgattttctaa

SEQ ID NO: 90 - DNA, 870 bp, Homo sapiens
  source 1..870: mol_type = genomic DNA
atgacaggagtgtttgacagaagggtccccagcatccgatccggcgacttccaagctccgttccagacgtccgcagctatgcaccatccgtctcaggaatcgccaactttgcccgagtcttcagctaccgattctgactactacagccctacggggggagccccgcacggctactgctctcctacctcggcttcctatggcaaagctctcaacccctaccagtatcagtatcacggcgtgaacggctccgccgggagctacccagccaaagcttatgccgactatagctacgctagctcctaccaccagtacggcggcgcctacaaccgcgtcccaagcgccaccaaccagccagagaaagaagtgaccgagcccgaggtgagaatggtgaatggcaaaccaaagaaagttcgtaaacccaggactatttattccagctttcagctggccgcattacagagaaggtttcagaagactcagtacctcgccttgccggaacgcgccgagctggccgcctcgctgggattgacacaaacacaggtgaaaatctggtttcagaacaaaagatccaagatcaagaagatcatgaaaaacggggagatgcccccggagcacagtcccagctccagcgacccaatggcgtgtaactcgccgcagtctccagcggtgtgggagccccagggctcgtcccgctcgctcagccaccaccctcatgcccaccctccgacctccaaccagtccccagcgtccagctacctggagaactctgcatcctggtacacaagtgcagccagctcaatcaattcccacctgccgccgccgggctccttacagcacccgctggcgctggcctccgggacactctattag

SEQ ID NO: 91 - DNA, 843 bp, Homo sapiens
  source 1..843: mol_type = genomic DNA
atgccagctgatataatggagaaaaattcctcgtccccggtggctgctaccccagccagtgtcaacacgacaccggataaaccaaagacagcatctgagcacagaaagtcatcaaagcctattatggagaaaagacgaagagcaagaataaatgaaagtctgagccagctgaaaacactgattttggatgctctgaagaaagatagctcgcggcattccaagctggagaaggcggacattctggaaatgacagtgaagcacctccggaacctgcagcgggcgcagatgacggctgcgctgagcacagacccaagtgtgctggggaagtaccgagccggcttcagcgagtgcatgaacgaggtgacccgcttcctgtccacgtgcgagggcgttaataccgaggtgcgcactcggctgctcggccacctggccaactgcatgacccagatcaatgccatgacctaccccgggcagccgcaccccgccttgcaggcgccgccaccgcccccaccgggacccggcggcccccagcacgcgccgttcgcgccgccgccgccactcgtgcccatccccgggggcgcggcgccccctcccggcggcgccccctgcaagctgggcagccaggctggagaggcggctaaggtgtttggaggcttccaggtggtaccggctcccgatggccagtttgctttcctcattcccaacggggccttcgcgcacagcggccctgtcatccccgtctacaccagcaacagcggcacctccgtgggccccaacgcagtgtcaccttccagcggcccctcgcttacggcggactccatgtggaggccgtggcggaactga

SEQ ID NO: 92 - DNA, 648 bp, Homo sapiens
  source 1..648: mol_type = genomic DNA
atgggcagcccccgctccgcgctgagctgcctgctgttgcacttgctggtcctctgcctccaagcccaggtaactgttcagtcctcacctaattttacacagcatgtgagggagcagagcctggtgacggatcagctcagccgccgcctcatccggacctaccaactctacagccgcaccagcgggaagcacgtgcaggtcctggccaacaagcgcatcaacgccatggcagaggacggcgaccccttcgcaaagctcatcgtggagacggacacctttggaagcagagttcgagtccgaggagccgagacgggcctctacatctgcatgaacaagaaggggaagctgatcgccaagagcaacggcaaaggcaaggactgcgtcttcacggagattgtgctggagaacaactacacagcgctgcagaatgccaagtacgagggctggtacatggccttcacccgcaagggccggccccgcaagggctccaagacgcggcagcaccagcgtgaggtccacttcatgaagcggctgccccggggccaccacaccaccgagcagagcctgcgcttcgagttcctcaactacccgcccttcacgcgcagcctgcgcggcagccagaggacttgggcccccgagccccgatag

SEQ ID NO: 93 - DNA, 975 bp, Homo sapiens
  source 1..975: mol_type = genomic DNA
atgaactgcatgaaaggcccgcttcacttggagcaccgagcagcggggaccaagctgtcggccgtctcctcatcttcctgtcaccatccccagccgttagccatggcttcggttctggctcccggtcagccccggtcgctggactcctccaagcacaggctggaggtgcacaccatctccgacacctccagcccggaggccgcagagaaagataaaagccagcaggggaagaatgaggacgtgggcgccgaggacccgtctaagaagaagcggcaaaggcggcagcggactcactttaccagccagcagctccaggagctggaggccactttccagaggaaccgctacccggacatgtccacacgcgaagaaatcgctgtgtggaccaaccttacggaagcccgagtccgggtttggttcaagaatcgtcgggccaaatggagaaagagggagcgcaaccagcaggccgagctatgcaagaatggcttcgggccgcagttcaatgggctcatgcagccctacgacgacatgtacccaggctattcctacaacaactgggccgccaagggccttacatccgcctccctatccaccaagagcttccccttcttcaactctatgaacgtcaaccccctgtcatcacagagcatgttttccccacccaactctatctcgtccatgagcatgtcgtccagcatggtgccctcagcagtgacaggcgtcccgggctccagtctcaacagcctgaataacttgaacaacctgagtagcccgtcgctgaattccgcggtgccgacgcctgcctgtccttacgcgccgccgactcctccgtatgtttatagggacacgtgtaactcgagcctggccagcctgagactgaaagcaaagcagcactccagcttcggctacgccagcgtgcagaacccggcctccaacctgagtgcttgccagtatgcagtggaccggcccgtgtga

SEQ ID NO: 94 - DNA, 987 bp, Mus musculus
  source 1..987: mol_type = genomic DNA
atggccacccaggtgatggggcagtcttctggaggaggcagtctcttcaacaacagtgccaacatgggcatggccttaaccaacgacatgtacgacctgcacgagctctcgaaagctgaactggcagcccctcagctcatcatgttagccaacgtggccctgacgggggaggcaagcggcagctgctgcgattacctggtcggtgaagagaggcagatggccgaattgatgcccgtgggagacaaccacttctcagaaagtgaaggagaaggcctggaagagtcggctgacctcaaagggctggaaaacatggaactgggaagtttggagctaagtgctgtagaaccccagcccgtatttgaagcctcagctgccccagaaatatacagcgccaataaagatcccgctccagaaacacccgtggcggaagacaaatgcaggagttctaaggccaagcccttccggtgtaagccttgccagtacgaagccgaatctgaagagcagtttgtgcatcacatccggattcacagcgctaagaagttctttgtggaggaaagtgcagagaaacaggccaaagcctgggagtcggggtcgtctccggccgaagagggcgagttctccaaaggccccatccgctgtgaccgctgtggctacaataccaaccggtatgaccactacatggcacacctgaagcaccacctgcgagctggcgagaacgagcgcatctacaagtgcatcatctgcacgtacacgacggtcagcgagtaccactggaggaaacacctgagaaaccatttccccaggaaagtctacacctgcagcaagtgcaactacttctcagacagaaaaaataactacgttcagcacgtgcgaactcacacaggagaacgcccgtataaatgtgaactttgtccttactcaagctctcagaagactcatctaacgcgacacatgcggactcattcagagtgtgatctagctgggtga

SEQ ID NO: 95 - DNA, 1025 bp, Homo sapiens
  source 1..1025: mol_type = genomic DNA
atgaccatggaatctggagccgagaaccagcagagtggagatgcagctgtaacagaagctgaaaaccaacaaatgacagttcaagcccagccacagattgccacattagcccaggtatctatgccagcagctcatgcaacatcatctgctcccaccgtaactctagtacagctgcccaatgggcagacagttcaagtccatggagtcattcaggcggcccagccatcagttattcagtctccacaagtccaaacagttcagtcttcctgtaaggacttaaaaagacttttctccggaacacagatttcaactattgcagaaagtgaagattcacaggagtcagtggatagtgtaactgattcccaaaagcgaagggaaattctttcaaggaggccttcctacaggaaaattttgaatgacttatcttctgatgcaccaggagtgccaaggattgaagaagagaagtctgaagaggagacttcagcacctgccatcaccactgtaacggtgccaactccaatttaccaaactagcagtggacagtatattgccattacccagggaggagcaatacagctggctaacaatggtaccgatggggtacagggcctgcaaacattaaccatgaccaatgcagcagccactcagccgggtactaccattctacagtatgcacagaccactgatggacagcagatcttagtgcccagcaaccaagttgttgttcaagctgcctctggagacgtacaaacataccagattcgcacagcacccactagcactattgcccctggagttgttatggcatcctccccagcacttcctacacagcctgctgaagaagcagcacgaaagagagaggtccgtctaatgaagaacagggaagcagctcgagagtgtcgtagaaagaagaaagaatatgtgaaatgtttagaaaacagagtggcagtgcttgaaaatcaaaacaagacattgattgaggagctaaaagcacttaaggacctttactgccacaaatcagatta

SEQ ID NO: 96 - DNA, 963 bp, Mus musculus
  source 1..963: mol_type = genomic DNA
atggctgagggcaaaggggctcctctgaggccttcagttgagaagagatggaagctcatggaacccaagcagacccaggcagggatgttcaagaaaatgagccttgtggactctgacactgctgcaggaaagggtagccaagatgaggcctatactgaactgagcctgccaacagcaccgaacaagcctcgactggacaggcctcgggcctgcaaggcatacacagagcagaggcacaataccttcacagagctatcatgtctccaggagaggccaggggacatccaggcccagacgaggaagctggagaacccagaaggccagctcggccctcagcagctgccctcgagtttcctcagagcctcaggtgatggcacagtgtgttcagcatggccaggtgccccccggagtgagcagaaaagtgctttcagcaagccagccaaacgcccagcagagaaacctaagcgctctcccatgcttctggctggtggaagtgcagagggctcatgggagctctcaggactcatcaccactgtggacatcccatattgggctcatctgtcaactttcaagttcatgggtgatttctggaaattgcacacattgtcacagaacattctcctctgcaatgctttccagggggctcccacaccatggctggagcatacccaggtacaagcccccacatcctcagctccttcctccacagcctcccgggctctcttgccgcccacactctcctccttgggcttgtctactcagaactggtgtgcgaagtgcaacctagcctttcgcctgacagctgacctggtcttccacatgcggtcacatcacaaaagggaacacgtgggccctgacccacattctaagaaacgaagagaggaagttctcacttgccccgtttgccacgagtacttccgggagcgccaccatctgtccaggcatatggcttcacatagttag

SEQ ID NO: 97 - DNA, 1374 bp, Homo sapiens
  source 1..1374: mol_type = genomic DNA
atgctgggagcggtgaagatggaagggcacgagccgtccgactggagcagctactatgcagagcccgagggctactcctccgtgagcaacatgaacgccggcctggggatgaacggcatgaacacgtacatgagcatgtcggcggccgccatgggcagcggctcgggcaacatgagcgcgggctccatgaacatgtcgtcgtacgtgggcgctggcatgagcccgtccctggcggggatgtcccccggcgcgggcgccatggcgggcatgggcggctcggccggggcggccggcgtggcgggcatggggccgcacttgagtcccagcctgagcccgctcggggggcaggcggccggggccatgggcggcctggccccctacgccaacatgaactccatgagccccatgtacgggcaggcgggcctgagccgcgcccgcgaccccaagacctacaggcgcagctacacgcacgcaaagccgccctactcgtacatctcgctcatcaccatggccatccagcagagccccaacaagatgctgacgctgagcgagatctaccagtggatcatggacctcttccccttctaccggcagaaccagcagcgctggcagaactccatccgccactcgctctccttcaacgactgtttcctgaaggtgccccgctcgcccgacaagcccggcaagggctccttctggaccctgcaccctgactcgggcaacatgttcgagaacggctgctacctgcgccgccagaagcgcttcaagtgcgagaagcagctggcgctgaaggaggccgcaggcgccgccggcagcggcaagaaggcggccgccggagcccaggcctcacaggctcaactcggggaggccgccgggccggcctccgagactccggcgggcaccgagtcgcctcactcgagcgcctccccgtgccaggagcacaagcgagggggcctgggagagctgaaggggacgccggctgcggcgctgagccccccagagccggcgccctctcccgggcagcagcagcaggccgcggcccacctgctgggcccgccccaccacccgggcctgccgcctgaggcccacctgaagccggaacaccactacgccttcaaccacccgttctccatcaacaacctcatgtcctcggagcagcagcaccaccacagccaccaccaccaccaaccccacaaaatggacctcaaggcctacgaacaggtgatgcactaccccggctacggttcccccatgcctggcagcttggccatgggcccggtcacgaacaaaacgggcctggacgcctcgcccctggccgcagatacctcctactaccagggggtgtactcccggcccattatgaactcctcttaa

SEQ ID NO: 98 - DNA, 1221 bp, Homo sapiens
  source 1..1221: mol_type = genomic DNA
atggatggatggagaaggatgcctcgctggggactgctgctgctgctctggggctcctgtacctttggtctcccgacagacaccaccacctttaaacggatcttcctcaagagaatgccctcaatccgagaaagcctgaaggaacgaggtgtggacatggccaggcttggtcccgagtggagccaacccatgaagaggctgacacttggcaacaccacctcctccgtgatcctcaccaactacatggacacccagtactatggcgagattgggatcgggaccccaccccaaaccttcaaagtcgtctttgacactggttcgtccaatgtttgggtgccctcctccaagtgcagccgtctctacactgcctgtgtgtatcacaagctcttcgatgcttcggattcctccagctacaagcacaatggaacagaactcaccctccgctattcaacagggacagtcagtggctttctcagccaggacatcatcaccgtgggtggaatcacggtgacacagatgtttggagaggtcacggagatgcccgccttacccttcatgctggccgagtttgatggggttgtgggcatgggcttcattgaacaggccattggcagggtcacccctatcttcgacaacatcatctcccaaggggtgctaaaagaggacgtcttctctttctactacaacagagattccgagaattcccaatcgctgggaggacagattgtgctgggaggcagcgacccccagcattacgaagggaatttccactatatcaacctcatcaagactggtgtctggcagattcaaatgaagggggtgtctgtggggtcatccaccttgctctgtgaagacggctgcctggcattggtagacaccggtgcatcctacatctcaggttctaccagctccatagagaagctcatggaggccttgggagccaagaagaggctgtttgattatgtcgtgaagtgtaacgagggccctacactccccgacatctctttccacctgggaggcaaagaatacacgctcaccagcgcggactatgtatttcaggaatcctacagtagtaaaaagctgtgcacactggccatccacgccatggatatcccgccacccactggacccacctgggccctgggggccaccttcatccgaaagttctacacagagtttgatcggcgtaacaaccgcattggcttcgccttggcccgctga

SEQ ID NO: 99 - DNA, 654 bp, Homo sapiens
  source 1..654: mol_type = genomic DNA
atgagtctggtaggtggttttccccaccacccggtggtgcaccacgagggctacccgtttgccgccgccgccgccgcagctgccgccgccgccgccagccgctgcagccatgaggagaacccctacttccatggctggctcatcggccaccccgagatgtcgccccccgactacagcatggccctgtcctacagccccgagtatgccagcggcgccgccggcctggaccactcccattacgggggggtgccgccgggcgccgggcccccgggcctgggggggccgcgcccggtgaagcgccgaggcaccgccaaccgcaaggagcggcgcaggactcagagcatcaacagcgccttcgccgaactgcgcgagtgcatccccaacgtacccgccgacaccaaactctccaaaatcaagaccctgcgcctggccaccagctacatcgcctacctcatggacctgctggccaaggacgaccagaatggcgaggcggaggccttcaaggcagagatcaagaagaccgacgtgaaagaggagaagaggaagaaggagctgaacgaaatcttgaaaagcacagtgagcagcaacgacaagaaaaccaaaggccggacgggctggccgcagcacgtctgggccctggagctcaagcagtga

SEQ ID NO: 100 - DNA, 942 bp, Homo sapiens
  source 1..942: mol_type = genomic DNA
atgacttcttgtcacattgctgaagaacatatacaaaaggttgctatctttggaggaacccatgggaatgagctaaccggagtatttctggttaagcattggctagagaatggcgctgagattcagagaacagggctggaggtaaaaccatttattactaaccccagagcagtgaagaagtgtaccagatatattgactgtgacctgaatcgcatttttgaccttgaaaatcttggcaaaaaaatgtcagaagatttgccatatgaagtgagaagggctcaagaaataaatcatttatttggtccaaaagacagtgaagattcctatgacattatttttgaccttcacaacaccacctctaacatggggtgcactcttattcttgaggattccaggaataactttttaattcagatgtttcattacattaagacttctctggctccactaccctgctacgtttatctgattgagcatccttccctcaaatatgcgaccactcgttccatagccaagtatcctgtgggtatagaagttggtcctcagcctcaaggggttctgagagctgatatcttggatcaaatgagaaaaatgattaaacatgctcttgattttatacatcatttcaatgaaggaaaagaatttcctccctgcgccattgaggtctataaaattatagagaaagttgattacccccgggatgaaaatggagaaattgctgctatcatccatcctaatctgcaggatcaagactggaaaccactgcatcctggggatcccatgtttttaactcttgatgggaagacgatcccactgggcggagactgtaccgtgtaccccgtgtttgtgaatgaggccgcatattacgaaaagaaagaagcttttgcaaagacaactaaactaacgctcaatgcaaaaagtattcgctgctgtttacattag

SEQ ID NO: 101 - DNA, 1590 bp, Homo sapiens
  source 1..1590: mol_type = genomic DNA
atgacaagctccaggctttggttttcgctgctgctggcggcagcgttcgcaggacgggcgacggccctctggccctggcctcagaacttccaaacctccgaccagcgctacgtcctttacccgaacaactttcaattccagtacgatgtcagctcggccgcgcagcccggctgctcagtcctcgacgaggccttccagcgctatcgtgacctgcttttcggttccgggtcttggccccgtccttacctcacagggaaacggcatacactggagaagaatgtgttggttgtctctgtagtcacacctggatgtaaccagcttcctactttggagtcagtggagaattataccctgaccataaatgatgaccagtgtttactcctctctgagactgtctggggagctctccgaggtctggagacttttagccagcttgtttggaaatctgctgagggcacattctttatcaacaagactgagattgaggactttccccgctttcctcaccggggcttgctgttggatacatctcgccattacctgccactctctagcatcctggacactctggatgtcatggcgtacaataaattgaacgtgttccactggcatctggtagatgatccttccttcccatatgagagcttcacttttccagagctcatgagaaaggggtcctacaaccctgtcacccacatctacacagcacaggatgtgaaggaggtcattgaatacgcacggctccggggtatccgtgtgcttgcagagtttgacactcctggccacactttgtcctggggaccaggtatccctggattactgactccttgctactctgggtctgagccctctggcacctttggaccagtgaatcccagtctcaataatacctatgagttcatgagcacattcttcttagaagtcagctctgtcttcccagatttttatcttcatcttggaggagatgaggttgatttcacctgctggaagtccaacccagagatccaggactttatgaggaagaaaggcttcggtgaggacttcaagcagctggagtccttctacatccagacgctgctggacatcgtctcttcttatggcaagggctatgtggtgtggcaggaggtgtttgataataaagtaaagattcagccagacacaatcatacaggtgtggcgagaggatattccagtgaactatatgaaggagctggaactggtcaccaaggccggcttccgggcccttctctctgccccctggtacctgaaccgtatatcctatggccctgactggaaggatttctacgtagtggaacccctggcatttgaaggtacccctgagcagaaggctctggtgattggtggagaggcttgtatgtggggagaatatgtggacaacacaaacctggtccccaggctctggcccagagcaggggctgttgccgaaaggctgtggagcaacaagttgacatctgacctgacatttgcctatgaacgtttgtcacacttccgctgtgagttgctgaggcgaggtgtccaggcccaacccctcaatgtaggcttctgtgagcaggagtttgaacagacctga

SEQ ID NO: 102 - DNA, 657 bp, Homo sapiens
  source 1..657: mol_type = genomic DNA
atggcgacccgcagccctggcgtcgtgattagtgatgatgaaccaggttatgaccttgatttattttgcatacctaatcattatgctgaggatttggaaagggtgtttattcctcatggactaattatggacaggactgaacgtcttgctcgagatgtgatgaaggagatgggaggccatcacattgtagccctctgtgtgctcaaggggggctataaattctttgctgacctgctggattacatcaaagcactgaatagaaatagtgatagatccattcctatgactgtagattttatcagactgaagagctattgtaatgaccagtcaacaggggacataaaagtaattggtggagatgatctctcaactttaactggaaagaatgtcttgattgtggaagatataattgacactggcaaaacaatgcagactttgctttccttggtcaggcagtataatccaaagatggtcaaggtcgcaagcttgctggtgaaaaggaccccacgaagtgttggatataagccagactttgttggatttgaaattccagacaagtttgttgtaggatatgcccttgactataatgaatacttcagggatttgaatcatgtttgtgtcattagtgaaactggaaaagcaaaatacaaagcctaa

SEQ ID NO: 103 - DNA, 1956 bp, Homo sapiens
  source 1..1956: mol_type = genomic DNA
atggcccgggggtcggcggttgcctgggcggcgctcgggccgttgttgtggggctgcgcgctggggctgcagggcgggatgctgtacccccaggagagcccgtcgcgggagtgcaaggagctggacggcctctggagcttccgcgccgacttctctgacaaccgacgccggggcttcgaggagcagtggtaccggcggccgctgtgggagtcaggccccaccgtggacatgccagttccctccagcttcaatgacatcagccaggactggcgtctgcggcattttgtcggctgggtgtggtacgaacgggaggtgatcctgccggagcgatggacccaggacctgcgcacaagagtggtgctgaggattggcagtgcccattcctatgccatcgtgtgggtgaatggggtcgacacgctagagcatgaggggggctacctccccttcgaggccgacatcagcaacctggtccaggtggggcccctgccctcccggctccgaatcactatcgccatcaacaacacactcacccccaccaccctgccaccagggaccatccaatacctgactgacacctccaagtatcccaagggttactttgtccagaacacatattttgactttttcaactacgctggactgcagcggtctgtacttctgtacacgacacccaccacctacatcgatgacatcaccgtcaccaccagcgtggagcaagacagtgggctggtgaattaccagatctctgtcaagggcagtaacctgttcaagttggaagtgcgtcttttggatgcagaaaacaaagtcgtggcgaatgggactgggacccagggccaacttaaggtgccaggtgtcagcctctggtggccgtacctgatgcacgaacgccctgcctatctgtattcattggaggtgcagctgactgcacagacgtcactggggcctgtgtctgacttctacacactccctgtggggatccgcactgtggctgtcaccaagagccagttcctcatcaatgggaaacctttctatttccacggtgtcaacaagcatgaggatgcggacatccgagggaagggcttcgactggccgctgctggtgaaggacttcaacctgcttcgctggcttggtgccaacgctttccgtaccagccactacccctatgcagaggaagtgatgcagatgtgtgaccgctatgggattgtggtcatcgatgagtgtcccggcgtgggcctggcgctgccgcagttcttcaacaacgtttctctgcatcaccacatgcaggtgatggaagaagtggtgcgtagggacaagaaccaccccgcggtcgtgatgtggtctgtggccaacgagcctgcgtcccacctagaatctgctggctactacttgaagatggtgatcgctcacaccaaatccttggacccctcccggcctgtgacctttgtgagcaactctaactatgcagcagacaagggggctccgtatgtggatgtgatctgtttgaacagctactactcttggtatcacgactacgggcacctggagttgattcagctgcagctggccacccagtttgagaactggtataagaagtatcagaagcccattattcagagcgagtatggagcagaaacgattgcagggtttcaccaggatccacctctgatgttcactgaagagtaccagaaaagtctgctagagcagtaccatctgggtctggatcaaaaacgcagaaaatacgtggttggagagctcatttggaattttgccgatttcatgactgaacagtcaccgacgagagtgctggggaataaaaaggggatcttcactcggcagagacaaccaaaaagtgcagcgttccttttgcgagagagatactggaagattgccaatgaaaccaggtatccccactcagtagccaagtcacaatgtttggaaaacagcccgtttacttga

SEQ ID NO: 104 - DNA, 1671 bp, Homo sapiens
  source 1..1671: mol_type = genomic DNA
atggagctgtgcgggctggggctgccccggccgcccatgctgctggcgctgctgttggcgacactgctggcggcgatgttggcgctgctgactcaggtggcgctggtggtgcaggtggcggaggcggctcgggccccgagcgtctcggccaagccggggccggcgctgtggcccctgccgctctcggtgaagatgaccccgaacctgctgcatctcgccccggagaacttctacatcagccacagccccaattccacggcgggcccctcctgcaccctgctggaggaagcgtttcgacgatatcatggctatatttttggtttctacaagtggcatcatgaacctgctgaattccaggctaaaacccaggttcagcaacttcttgtctcaatcacccttcagtcagagtgtgatgctttccccaacatatcttcagatgagtcttatactttacttgtgaaagaaccagtggctgtccttaaggccaacagagtttggggagcattacgaggtttagagacctttagccagttagtttatcaagattcttatggaactttcaccatcaatgaatccaccattattgattctccaaggttttctcacagaggaattttgattgatacatccagacattatctgccagttaagattattcttaaaactctggatgccatggcttttaataagtttaatgttcttcactggcacatagttgatgaccagtctttcccatatcagagcatcacttttcctgagttaagcaataaaggaagctattctttgtctcatgtttatacaccaaatgatgtccgtatggtgattgaatatgccagattacgaggaattcgagtcctgccagaatttgatacccctgggcatacactatcttggggaaaaggtcagaaagacctcctgactccatgttacagtagacaaaacaagttggactcttttggacctataaaccctactctgaatacaacatacagcttccttactacatttttcaaagaaattagtgaggtgtttccagatcaattcattcatttgggaggagatgaagtggaatttaaatgttgggaatcaaatccaaaaattcaagatttcatgaggcaaaaaggctttggcacagattttaagaaactagaatctttctacattcaaaaggttttggatattattgcaaccataaacaagggatccattgtctggcaggaggtttttgatgataaagcaaagcttgcgccgggcacaatagttgaagtatggaaagacagcgcatatcctgaggaactcagtagagtcacagcatctggcttccctgtaatcctttctgctccttggtacttagatttgattagctatggacaagattggaggaaatactataaagtggaacctcttgattttggcggtactcagaaacagaaacaacttttcattggtggagaagcttgtctatggggagaatatgtggatgcaactaacctcactccaagattatggcctcgggcaagtgctgttggtgagagactctggagttccaaagatgtcagagatatggatgacgcctatgacagactgacaaggcaccgctgcaggatggtcgaacgtggaatagctgcacaacctctttatgctggatattgtaaccatgagaacatgtaa

SEQ ID NO: 105 - DNA, 1290 bp, Homo sapiens
  source 1..1290: mol_type = genomic DNA
atgcagctgaggaacccagaactacatctgggctgcgcgcttgcgcttcgcttcctggccctcgtttcctgggacatccctggggctagagcactggacaatggattggcaaggacgcctaccatgggctggctgcactgggagcgcttcatgtgcaaccttgactgccaggaagagccagattcctgcatcagtgagaagctcttcatggagatggcagagctcatggtctcagaaggctggaaggatgcaggttatgagtacctctgcattgatgactgttggatggctccccaaagagattcagaaggcagacttcaggcagaccctcagcgctttcctcatgggattcgccagctagctaattatgttcacagcaaaggactgaagctagggatttatgcagatgttggaaataaaacctgcgcaggcttccctgggagttttggatactacgacattgatgcccagacctttgctgactggggagtagatctgctaaaatttgatggttgttactgtgacagtttggaaaatttggcagatggttataagcacatgtccttggccctgaataggactggcagaagcattgtgtactcctgtgagtggcctctttatatgtggccctttcaaaagcccaattatacagaaatccgacagtactgcaatcactggcgaaattttgctgacattgatgattcctggaaaagtataaagagtatcttggactggacatcttttaaccaggagagaattgttgatgttgctggaccagggggttggaatgacccagatatgttagtgattggcaactttggcctcagctggaatcagcaagtaactcagatggccctctgggctatcatggctgctcctttattcatgtctaatgacctccgacacatcagccctcaagccaaagctctccttcaggataaggacgtaattgccatcaatcaggaccccttgggcaagcaagggtaccagcttagacagggagacaactttgaagtgtgggaacgacctctctcaggcttagcctgggctgtagctatgataaaccggcaggagattggtggacctcgctcttataccatcgcagttgcttccctgggtaaaggagtggcctgtaatcctgcctgcttcatcacacagctcctccctgtgaaaaggaagctagggttctatgaatggacttcaaggttaagaagtcacataaatcccacaggcactgttttgcttcagctagaaaatacaatgcagatgtcattaaaagacttactttaa

SEQ ID NO: 106 - DNA, 1611 bp, Homo sapiens
  source 1..1611: mol_type = genomic DNA
atggagttttcaagtccttccagagaggaatgtcccaagcctttgagtagggtaagcatcatggctggcagcctcacaggattgcttctacttcaggcagtgtcgtgggcatcaggtgcccgcccctgcatccctaaaagcttcggctacagctcggtggtgtgtgtctgcaatgccacatactgtgactcctttgaccccccgacctttcctgcccttggtaccttcagccgctatgagagtacacgcagtgggcgacggatggagctgagtatggggcccatccaggctaatcacacgggcacaggcctgctactgaccctgcagccagaacagaagttccagaaagtgaagggatttggaggggccatgacagatgctgctgctctcaacatccttgccctgtcaccccctgcccaaaatttgctacttaaatcgtacttctctgaagaaggaatcggatataacatcatccgggtacccatggccagctgtgacttctccatccgcacctacacctatgcagacacccctgatgatttccagttgcacaacttcagcctcccagaggaagataccaagctcaagatacccctgattcaccgagccctgcagttggcccagcgtcccgtttcactccttgccagcccctggacatcacccacttggctcaagaccaatggagcggtgaatgggaaggggtcactcaagggacagcccggagacatctaccaccagacctgggccagatactttgtgaagttcctggatgcctatgctgagcacaagttacagttctgggcagtgacagctgaaaatgagccttctgctgggctgttgagtggataccccttccagtgcctgggcttcacccctgaacatcagcgagacttcattgcccgtgacctaggtcctaccctcgccaacagtactcaccacaatgtccgcctactcatgctggatgaccaacgcttgctgctgccccactgggcaaaggtggtactgacagacccagaagcagctaaatatgttcatggcattgctgtacattggtacctggactttctggctccagccaaagccaccctaggggagacacaccgcctgttccccaacaccatgctctttgcctcagaggcctgtgtgggctccaagttctgggagcagagtgtgcggctaggctcctgggatcgagggatgcagtacagccacagcatcatcacgaacctcctgtaccatgtggtcggctggaccgactggaaccttgccctgaaccccgaaggaggacccaattgggtgcgtaactttgtcgacagtcccatcattgtagacatcaccaaggacacgttttacaaacagcccatgttctaccaccttggccacttcagcaagttcattcctgagggctcccagagagtggggctggttgccagtcagaagaacgacctggacgcagtggcactgatgcatcccgatggctctgctgttgtggtcgtgctaaaccgctcctctaaggatgtgcctcttaccatcaaggatcctgctgtgggcttcctggagacaatctcacctggctactccattcacacctacctgtggcgtcgccagtga

SEQ ID NO: 107 - DNA, 642 bp, Homo sapiens
  source 1..642: mol_type = genomic DNA
atgccccggagggcggagaactgggacgaggccgaggtaggcgcggaggaggcaggcgtcgaagagtacggccctgaagaagacggcggggaggagtcgggcgccgaggagtccggcccggaagagtccggcccggaggaactgggcgccgaggaggagatggaggccgggcggccgcggcccgtgctgcgctcggtgaactcgcgcgagccctcccaggtcatcttctgcaatcgcagtccgcgcgtcgtgctgcccgtatggctcaacttcgacggcgagccgcagccctacccaacgctgccgcctggcacgggccgccgcatccacagctaccgaggtcacctttggctcttcagagatgcagggacacacgatgggcttctggttaaccaaactgaattatttgtgccatctctcaatgttgacggacagcctatttttgccaatatcacactgccagtgtatactctgaaagagcgatgcctccaggttgtccggagcctagtcaagcctgagaattacaggagactggacatcgtcaggtcgctctacgaagatctggaagaccacccaaatgtgcagaaagacctggagcggctgacacaggagcgcattgcacatcaacggatgggagattga

SEQ ID NO: 108 - DNA, 444 bp, Homo sapiens
  source 1..444: mol_type = genomic DNA
atggtgcatctgactcctgaggagaagtctgccgttactgccctgtggggcaaggtgaacgtggatgaagttggtggtgaggccctgggcaggctgctggtggtctacccttggacccagaggttctttgagtcctttggggatctgtccactcctgatgctgttatgggcaaccctaaggtgaaggctcatggcaagaaagtgctcggtgcctttagtgatggcctggctcacctggacaacctcaagggcacctttgccacactgagtgagctgcactgtgacaagctgcacgtggatcctgagaacttcaggctcctgggcaacgtgctggtctgtgtgctggcccatcactttggcaaagaattcaccccaccagtgcaggctgcctatcagaaagtggtggctggtgtggctaatgccctggcccacaagtatcactaa

SEQ ID NO: 109 - DNA, 951 bp, Homo sapiens
  source 1..951: mol_type = genomic DNA
atgatagtgtttgtcaggttcaactccagccatggtttcccagtggaggtcgattctgacaccagcatcttccagctcaaggaggtggttgctaagcgacagggggttccggctgaccagttgcgtgtgattttcgcagggaaggagctgaggaatgactggactgtgcaggaatttttctttaaatgtggagcacaccccacctctgacaaggaaacatcagtagctttgcacctgatcgcaacaaatagtcggaacatcacttgcattacgtgcacagacgtcaggagccccgtcctggttttccagtgcaactcccgccacgtgatttgcttagactgtttccacttatactgtgtgacaagactcaatgatcggcagtttgttcacgaccctcaacttggctactccctgccttgtgtggctggctgtcccaactccttgattaaagagctccatcacttcaggattctgggagaagagcagtacaaccggtaccagcagtatggtgcagaggagtgtgtcctgcagatggggggcgtgttatgcccccgccctggctgtggagcggggctgctgccggagcctgaccagaggaaagtcacctgcgaagggggcaatggcctgggctgtgggtttgccttctgccgggaatgtaaagaagcgtaccatgaaggggagtgcagtgccgtatttgaagcctcaggaacaactactcaggcctacagagtcgatgaaagagccgccgagcaggctcgttgggaagcagcctccaaagaaaccatcaagaaaaccaccaagccctgtccccgctgccatgtaccagtggaaaaaaatggaggctgcatgcacatgaagtgtccgcagccccagtgcaggctcgagtggtgctggaactgtggctgcgagtggaaccgcgtctgcatgggggaccactggttcgacgtgtag

SEQ ID NO: 110 - DNA, 1046 bp, Homo sapiens
  source 1..1046: mol_type = genomic DNA
aaggacaacggccatccctgtggctgggccgccggctacgcaatgctgtctctcttgctgatcctctcaggcctgggccggctgacctccgcgggcccacgccacttattccatcaaaattgaggggaaaccatacacttcctgcttgaaaaacagtcatttttacacccacatttcctggtgtatttatacaacaaatcaggaacattgtatgcagattcttcattttcaaagggtcattgcttttaccaaggatatgctgcagacattccaaaatcagttgtggcactacgcacctgttctggactcagatgttttcccagcttaatatgacagttatgctgccttccttggagatctggtcagatcaaaataagatttcaacaagtggtcatgctgatgaaatactacagcgatttttgccttggaaacaaaaatttttgtttcaaaggtctcatgatatgacatacttattaatttataggaaccattctacttatgtgggagcaacatatcacggaatggcatgcgatccaaagtttgcaacaggaattgctctgtatccaaagaaaatcactgcagaggccttttcagttgttatggcacagttgcttggaattaatctgggattgacatatgatgatatctacaattgttactgtccaggaactacatgcataatgaatcctgatgcgatatgatcccatggtatgaagttttttagcagttgcagcatggatggatttaaacggatagttctgcagcctgaacttaaatgttttcaggataaaacagtttcaaaaatgacttaccgaaaatcttcaacttgtggcaatggaattttggaacctacagagcagtgtgattgtggctataaagaggcatgcactcataaaaaatgctgtaatcctgcagattgtactctagttagatctgcagaatgtggcactggatcatgctgtaacaataaaacttgtacgatccacgaaagaggccatgtctgcagaaaaagtgtagatatgtgtgattttccagaatattgcaat

SEQ ID NO: 111 - DNA, 3334 bp, Homo sapiens
  source 1..3334: mol_type = genomic DNA
gcctgtctgcgcaagcgctaaccaagaaacgacggtttcgggtagattgttggttaagaagaaagctgggaaagtgaaggagagggggaagaaaggaagtgaaaagactttggctgttggaatctcagatctggaataggctgtataggctatttataatctctaattgccgaggaacctgaagttcagagttaaccagtgactgactcaggacatgcaaaatggcaagacccgaggtagaagagctcacctttcctgactctcagtttcctgttccctgaaaatgtaagctaagctggcagccctgtcccagcaagggggaggtacatggaaggccacaggaagaaacaagatcttgagctgagcaagaacatcccagcatcttcattgactttaaaagtatattctggagtcttccgtggttcactattccagtactacagagattccttatattacatggcaggaggggggtaaactgagggatagtgaagacaacaataaattaatcaagagctttcctcatatctcagaacctatcctctgtaagaatgtcagaaaaggttgactggttacaaagccaaaatggagtatgcaaagttgatgtctattctcctggagacaaccaagcccaggactggaaaatggacacctccacggatcctgtcagagtgctcagctggctccgcagagacctggagaagagtacagcagagttccaagatgttcggttcaaacccggagaatcatttggtggggaaacgtccaactcaggagacccacacaaaggtttctctgtagactattacaacaccaccaccaagggcactccagaaagattgcattttgagatgactcacaaagagattccttgccagggccccagggcccaacttggcaacgggagttcagtagatgaagtttccttctatgctaaccgcctcacgaatctagtcatagccatggcccgcaaagagatcaatgagaagatcgatggctctgaaaacaaatgtgtctatcagtcattgtacatggggaatgaacccacacccaccaaaagcctcagtaagatagcatcagagcttgtgaatgagaccgtctctgcatgttccaggaatgctgccccagacaaggctcctggctctggagacagagtctcgggatcatcacaaagtcccccaaatttgaaatacaagtccactttgaagatcaaggagagcaccaaagaaagacagggtccagatgacaagcctccttctaagaagtctttcttctataaggaagtgtttgaatctcgtaatggagattatgccagagagggtggaaggttctttcctcgggagagaaagaggtttcgagggcaggaaaggcctgatgactttacggcttctgttagtgaagggatcatgacctatgctaacagtgtggtatctgatatgatggtctccatcatgaagacactgaagatccaagtgaaagacacaaccattgccaccatcctactgaagaaggttctgctcaagcatgcaaaagaggtggtctcggatctcatcgactccttcttgaggaatctccacagcgtcacagggaccctcatgactgacacacagtttgtctcggctgtgaaaagaactgtcttctctcatggaagccaaaaggccacagatatcatggatgccatgctaaggaagctgtacaatgtaatgtttgccaagaaagtccctgagcatgtcaggaaagcccaagacaaggctgagagttattccctcatctccatgaaaggaatgggtgatcctaaaaaccgaaatgtgaactttgccatgaaatctgaaactaaattgagagaaaaaatgtattctgaacccaaatcagaggaggagacttgtgcgaaaactctgggtgagcacattatcaaagaggggcttaccttgtggcataaaactcagcagaaagaatgtaaatctctaggtttccagcatgcagcatttgaagctcccaacacacagcgtaagcctgcatcagacatttcctttgagtaccctgaagatattggcaacctcagccttcctccatatcctccagagaaacctgagaattttatgtatgattcagactcctgggccgaggacctgatcgtgtctgccctgcttctgattcaatatcacctggcccagggaggaagaagggatgcacggagcttcgttgaagctgctggcaccaccaactttcctgccaatgaacctcctgtagctcccgatgaatcttgccttaagtctgctcccattgtaggtgaccaagaacaagcagaaaagaaggacctaaggagtgttttctttaatttcatccggaacttacttagtgagaccattttcaagcgtgaccagagccctgaacccaaggtgccggaacagccagttaaggaagataggaagttgtgtgaaagaccgttggcgtcttctccccccaggctatatgaggatgatgagacccctggtgccctttctgggctgaccaagatggctgtcagccagatagatggccacatgagtgggcagatggtagaacatctgatgaactcagtgatgaagctgtgtgtcatcattgctaagtcctgtgatgcttcgttggcagagctgggagatgacaagtctggagatgccagtaggctaacttcggccttcccagatagtttatatgagtgcttaccagccaagggcacagggtcagcagaagctgtcctgcagaatgcctatcaagctatccataatgaaatgagaggcacatcaggacagccccctgaagggtgtgcagcacccacggtgattgtcagcaatcacaacctaacggacacagttcagaacaagcaactccaagccgtccttcaatgggtagctgcctctgagctcaatgtccctattttgtattttgctggtgatgatgaagggatccaggagaagctacttcagctctcagctgctgctgtggacaaaggatgcagtgtgggcgaggttctgcagtcggtgctgcgctatgagaaggagcgccagctgaatgaggcggtggggaatgtcacaccgctgcagctgctggactggctgatggtgaacctgtaatcggcaaccccactgctttcccctcttctggcagtggggccggcccttatccccgcccttctttctcacttccacatctccccctctatatcctcacagagccctaacattatcttcacaccactctcatcaaagacatgtcatcttgtgctagccactggattttgcagattttcctgtccatgcaagcaaggacgtaaaattaaaaaattacaattaaa

SEQ ID NO: 112 - DNA, 3323 bp, Homo sapiens
  source 1..3323: mol_type = genomic DNA
gtctgcgcaagcgctaaccaagaaacgacggtttcgggtagattgttggttaagaagaaagctgggaaagtgaaggagagggggaagaaaggaagtgaaaagactttggctgttggaatctcagatctggaataggctgtataggctatttataatctctaattgccgaggaacctgaagttcagagttaaccagtgactgactcaggacatgcaaaatggcaagacccgaggtagaagagctcacctttcctgactctcagtttcctgttccctgaaaattcccagcaagggggaggtacatggaaggccacaggaagaaacaagatcttgagctgagcaagaacatcccagcatcttcattgactttaaaagtatattctggagtcttccgtggttcactattccagtactacagagattccttatattacatggcaggaggggggtaaactgagggatagtgaagacaacaataaattaatcaagagctttcctcatatctcagaacctatcctctgtaagaatgtcagaaaaggttgactggttacaaagccaaaatggagtatgcaaagttgatgtctattctcctggagacaaccaagcccaggactggaaaatggacacctccacggatcctgtcagagtgctcagctggctccgcagagacctggagaagagtacagcagagttccaagatgttcggttcaaacccggagaatcatttggtggggaaacgtccaactcaggagacccacacaaaggtttctctgtagactattacaacaccaccaccaagggcactccagaaagattgcattttgagatgactcacaaagagattccttgccagggccccagggcccaacttggcaacgggagttcagtagatgaagtttccttctatgctaaccgcctcacgaatctagtcatagccatggcccgcaaagagatcaatgagaagatcgatggctctgaaaacaaatgtgtctatcagtcattgtacatggggaatgaacccacacccaccaaaagcctcagtaagatagcatcagagcttgtgaatgagaccgtctctgcatgttccaggaatgctgccccagacaaggctcctggctctggagacagagtctcgggatcatcacaaagtcccccaaatttgaaatacaagtccactttgaagatcaaggagagcaccaaagaaagacagggtccagatgacaagcctccttctaagaagtctttcttctataaggaagtgtttgaatctcgtaacggagattatgccagagagggtggaaggttctttcctcgggagagaaagaggtttcgagggcaggaaaggcctgatgactttacggcttctgttagtgaagggatcatgacctatgctaacagtgtggtatctgatatgatggtctccatcatgaagacactgaagatccaagtgaaagacacaaccattgccaccatcctactgaagaaggttctgctcaagcatgcaaaagaggtggtctcggatctcatcgactccttcttgaggaatctccacagcgtcacagggaccctcatgactgacacacagtttgtctcggctgtgaaaagaactgtcttctctcatggaagccaaaaggccacagatatcatggatgccatgctaaggaagctgtacaatgtaatgtttgccaagaaagtccctgagcatgtcaggaaagcccaagacaaggctgagagttattccctcatctccatgaaaggaatgggtgatcctaaaaaccgaaatgtgaactttgccatgaaatctgaaactaaattgagagaaaaaatgtattctgaacccaaatcagaggaggagacttgtgcgaaaactctgggtgagcacattatcaaagaggggcttaccctgtggcataaaagtcagcagaaagaatgtaaatctctaggtttccagcatgcagcattcgaagctcccaacacacagcgtaagcctgcatcagacatttcctttgagtaccctgaagatattggcaacctcagccttcctccatatcctccagagaaacctgagaattttatgtatgattcagactcctgggccaaggacctgatcgtgtctgccctgcttctgattcaatatcacctggcccagggaggaagaagggatgcacggagcttcgttgaagctgctggcaccaccaactttcctgccaatgaacctcctgtagctcccgatgaatcttgccttaagtctgctcccattgtaggtgaccaagaacaagcagaaaagaaggacctaaggagtgttttctttaatttcatccggaacttacttagtgagaccattttcaagcgtgaccagagccctgaacccaaggtgccggaacagccagttaaggaagataggaagttgtgtgaaagaccgttggcgtcttctccccccaggctatatgaggatgatgagacccctggtgccctttctgggctgaccaagatggctgtcagccagatagatggccacatgagtgggcagatggtagaacatctgatgaactcagtgatgaagctgtgtgtcatcattgctaagtcctgtgatgcttcgttggcagagctgggagatgacaagtctggagatgccagtaggctaacttcggccttcccagatagtttatatgagtgcttaccagccaagggcacagggtcagcagaagctgtcctgcagaatgcctatcaagctatccataatgaaatgagaggcacatcaggacagccccctgaagggtgtgcagcacccacggtgattgtcagcaatcacaacctaacggacacagttcagaacaagcaactccaagccgtccttcaatgggtagctgcctctgagctcaatgtccctattttgtattttgctggtgatgatgaagggatccaggagaagctacttcagctctcagctgctgctgtggacaaaggatgcagtgtgggcgaggttctgcagtcggtgctgcgctatgagaaggagcgccagctgaatgaggcggtggggaatgtcacaccgctgcagctgctggactggctgatggtgaacctgtaatcggcaaccccactgctttcccctcttctggcagtggggccggcccttatccccgcccttctttctcacttccacatctccccctctatatcctcacagagccctaacattatcttcacaccactctcatcaaagacatgtcatcttgtgctagccactggattttgcagattttcctgtccatgcaagcaaggacgtaaaattaaaaaattacaattaaagggctccacaaaaaa

SEQ ID NO: 113 - DNA, 1997 bp, Homo sapiens
  source 1..1997: mol_type = genomic DNA
actttcttttgtaaatgtggtttctacaaagatgaaactactaaaacttacaggttttatttttttcttgttttttttgactgaatccctaaccctgcccacacaacctcgggatatagagaacttcaatagtactcaaaaatttatagaagataatattgaatacatcaccatcattgcatttgctcagtatgttcaggaagcaacctttgaagaaatggaaaagctggtgaaagacatggtagaatacaaagacagatgtatggctgacaagacgctcccagagtgttcaaaattacctaataatgttttacaggaaaaaatatgtgctatggaggggctgccacaaaagcataatttctcacactgctgcagtaaggttgatgctcaaagaagactctgtttcttctataacaagaaatctgatgtgggatttctgcctcctttccctaccctggatcccgaagagaaatgccaggcttatgaaagtaacagagaatcccttttaaatcactttttatatgaagttgccagaaggaacccatttgtcttcgcccctacacttctaactgttgctgttcattttgaggaggtggccaaatcatgttgtgaagaacaaaacaaagtcaactgccttcaaacaagggcaatacctgtcacacaatatttaaaagcattttcttcttatcaaaaacatgtctgtggggcacttttgaaatttggaaccaaagttgtacactttatatatattgcgatactcagtcaaaaattccccaagattgaatttaaggagcttatttctcttgtagaagatgtttcttccaactatgatggatgctgtgaaggggatgttgtgcagtgcatccgtgacacgagcaaggttatgaaccatatttgttcaaaacaagattctatctccagcaaaatcaaagagtgctgtgaaaagaaaataccagagcgcggccagtgcataattaactcaaacaaagatgatagaccaaaggatttatctctaagagaaggaaaatttactgacagtgaaaatgtgtgtcaagaacgagatgctgacccagacaccttctttgcgaagtttacttttgaatactcaaggagacatccagacctgtctataccagagcttttaagaattgttcaaatatacaaagatctcctgagaaattgctgcaacacagaaaaccctccaggttgttaccgttacgcggaagacaaattcaatgagacaactgagaaaagcctcaagatggtacaacaagaatgtaaacatttccagaatttggggaaggatggtttgaaataccattacctcatcaggctcacgaagatagctccccaactctccactgaagaactggtgtctcttggcgagaaaatggtgacagctttcactacttgctgtacgctaagtgaagagtttgcctgtgttgataatttggcagatttagtttttggagagttatgtggagtaaatgaaaatcgaactatcaaccctgctgtggaccactgctgtaaaacaaactttgccttcagaaggccctgctttgagagtttgaaagctgataaaacatatgtgcctccacctttctctcaagatttatttacctttcacgcagacatgtgtcaatctcagaatgaggagcttcagaggaagacagacaggtttcttgtcaacttagtgaagctgaagcatgaactcacagatgaagagctgcagtctttgtttacaaatttcgcaaatgtagtggataagtgctgcaaagcagagagtcctgaagtctgctttaatgaagagagtccaaaaattggcaactgaagccagctgctggagatatgtaaagaaaaaagcaccaaagggaaggcttcctatctgtgtggtgatgaatcgcatttcctgagaacaaaataaaaggatttttctgtaactgtcacctgaaataatacattgcagcaagcaataaacacaacattttgtaaagtta

SEQ ID NO: 114 - DNA, 1261 bp, Homo sapiens
  source 1..1261: mol_type = genomic DNA
ccacggctgctcacgacgccgcggatcccgaagcctgtgtagcagtgagacatcagtgaggctgcaggacgagcaggattggaagcgccccggccagaaagtgaccccccacccctttcaggaccctgtgaacgggaacagccatccagagggttcaggaaggcgtccgcgccctcacctcttctccccatgagctcccccagagctgtggtgcagctgggcaaagctcaacctgcaggcgaagagttggctacagcaaaccaaacagcccagcagcccagcagcccagccatgcggcgcctcacagtcgatgactttgaaatcgggcgtcccctgggcaaggggaaatttgggaatgtgtacctggctcggctcaaggaaagccatttcattgtggccctgaaggttctcttcaagtcgcagatagagaaggaaggactggagcaccagctgcgccgggaaattgagatccaggctcatctacaacaccccaatatcctgcgcctgtataactatttccatgatgcacgccgggtgtacctgattctggaatatgctccaaggggtgagctctacaaggagctgcagaaaagcgagaaattagatgaacagcgcacagccacgataatagaggagttggcagatgccctgacctactgccatgacaagaaagtgattcacagagatattaagccagagaacctgctgctggggttcaggggtgaggtgaagattgcagattttggctggtctgtgcacaccccctccctgaggaggaagacaatgtgtgggacactggactacttgccgccagaaatgattgaggggagaacatatgatgaaaaggtggatttgtggtgcattggagtgctctgctatgagctgctggtgggatatccaccctttgagagcgcctcccacagtgagacttacagacgcatcctcaaggtagatgtgaggtttccactatcaatgcctctgggggcccgggacttgatttccaggcttctcagataccagcccttggagagactgcccctggcccagatcctgaagcacccctgggttcaggcccactcccgaagggtgctgcctccctgtgctcagatggcttcctgagccctgtctgcctctgttccctttgtgtgtgttcagggagctctcctggctctgccacctcatttgtctttatttttttctcttttaagatgtaagatgctaattaataaaagctgaatcatttcataccaaaaaaaaaaaa

SEQ ID NO: 115 - DNA, 1120 bp, Homo sapiens
  source 1..1120: mol_type = genomic DNA
ggaagtacctctctgagcggttggtgccgggtataaaagaaggccgcgcagccacggctgctcacgacgccgcggatcccgaagcctgtgtagcagtgagacatcatggctacagcaaaccaaacagcccagcagcccagcagcccagccatgcggcgcctcacagtcgatgactttgaaatcgggcgtcccctgggcaaggggaaatttgggaatgtgtacctggctcggctcaaggaaagccatttcattgtggccctgaaggttctcttcaagtcgcagatagagaaggaaggactggagcaccagctgcgccgggaaattgagatccaggctcatctacaacaccccaatatcctgcgcctgtataactatttccatgatgcacgccgggtgtacctgattctggaatatgctccaaggggtgagctctacaaggagctgcagaaaagcgagaaattagatgaacagcgcacagccacgataatagaggagttggcagatgccctgacctactgccatgacaagaaagtgattcacagagatattaagccagagaacctgctgctggggttcaggggtgaggtgaagattgcagattttggctggtctgtgcacaccccctccctgaggaggaagacaatgtgtgggacactggactacttgccgccagaaatgattgaggggagaacatatgatgaaaaggtggatttgtggtgcattggagtgctctgctatgagctgctggtgggatatccaccctttgagagcgcctcccacagtgagacttacagacgcatcctcaaggtagatgtgaggtttccactatcaatgcctctgggggcccgggacttgatttccaggcttctcagataccagcccttggagagactgcccctggcccagatcctgaagcacccctgggttcaggcccactcccgaagggtgctgcctccctgtgctcagatggcttcctgagccctgtctgcctctgttccctttgtgtgtgttcagggagctctcctggctctgccacctcatttgtctttatttttttctcttttaagatgtaagatgctaattaataaaagctgaatcatttcataccaaaaaaaaaaaa

SEQ ID NO: 116 - DNA, 1262 bp, Homo sapiens
  source 1..1262: mol_type = genomic DNA
tcccttgggcttgtgttggggcctgttgttgaacactaagcctttcaagatggtcctcctcagtattcttagaattctttttctttgtgaactcgtgcttttcatggaacacagggcccaaatggcagaaggagggcagtcctctattgcccttctggctgaggcccctactttgcccctgattgaggagctgctagaagaatcccctggcgaacagccaaggaagccccggctcctagggcattcactgcggtacatgctggagttgtaccggcgttcagctgactcgcatgggcaccctagagagaaccgcaccattggggccaccatggtgaggctggtgaagcccttgaccaatgtggcaaggcctcacagaggtacctggcatatacagatcctgggctttcctctcagaccaaaccgaggactataccaactagttagagccactgtggtttaccgccatcatctccaactaactcgcttcaatctctcctgccatgtggagccctgggtgcagaaaaacccaaccaaccacttcccttcctcagaaggagattcctcaaaaccttccctgatgtctaacgcttggaaagagatggatatcacacaacttgttcagcaaaggttctggaataacaagggacacaggatcctacgactccgttttatgtgtcagcagcaaaaagatagtggtggtcttgagctctggcatggcacttcatccttggacattgccttcttgttactctatttcaatgatactcataaaagcattcggaaggctaaatttcttcccaggggcatggaggagttcatggaaagggaatctcttctccggagaacccgacaagcagatggtatctcagctgaggttactgcctcttcctcaaaacatagcgggcctgaaaataaccagtgttccctccaccctttccaaatcagcttccgccagctgggttgggatcactggatcattgctccccctttctacaccccaaactactgtaaaggaacttgtctccgagtactacgcgatggtctcaattcccccaatcacgccattattcagaaccttatcaatcagttggtggaccagagtgtcccccggccctcctgtgtcccgtataagtatgttccaattagtgtccttatgattgaggcaaatgggagtattttgtacaaggagtatgagggtatgattgctgagtcttgtacatgcagatgacagcaacagtacggctagatcaggtttcccagga

SEQ ID NO: 117 - DNA, 2010 bp, Homo sapiens
  source 1..2010: mol_type = genomic DNA
cgaacgccttcgcgcgatcgccctggaaacgcattctctgcgaccggcagccgccaatgggaagggagtgagtgccacgaacaggccaataaggagggagcagtgcggggtttaaatctgaggctaggctggctcttctcggcgtgctgcggcggaacggctgttggtttctgctgggtgtaggtccttggctggtcgggcctccggtgttctgcttctccccgctgagctgctgcctggtgaagaggaagccatggcgctccgagtcaccaggaactcgaaaattaatgctgaaaataaggcgaagatcaacatggcaggcgcaaagcgcgttcctacggcccctgctgcaacctccaagcccggactgaggccaagaacagctcttggggacattggtaacaaagtcagtgaacaactgcaggccaaaatgcctatgaagaaggaagcaaaaccttcagctactggaaaagtcattgataaaaaactaccaaaacctcttgaaaaggtacctatgctggtgccagtgccagtgtctgagccagtgccagagccagaacctgagccagaacctgagcctgttaaagaagaaaaactttcgcctgagcctattttggttgatactgcctctccaagcccaatggaaacatctggatgtgcccctgcagaagaagacctgtgtcaggctttctctgatgtaattcttgcagtaaatgatgtggatgcagaagatggagctgatccaaacctttgtagtgaatatgtgaaagatatttatgcttatctgagacaacttgagaataattgtgtgcccaagaagatgctgcagctggttggtgtcactgccatgtttattgcaagcaaatatgaagaaatgtaccctccagaaattggtgactttgcttttgtgactgacaacacttatactaagcaccaaatcagacagatggaaatgaagattctaagagctttaaactttggtctgggtcggcctctacctttgcacttccttcggagagcatctaagattggagaggttgatgtcgagcaacatactttggccaaatacctgatggaactaactatgttggactatgacatggtgcactttcctccttctcaaattgcagcaggagctttttgcttagcactgaaaattctggataatggtgaatggacaccaactctacaacattacctgtcatatactgaagaatctcttcttccagttatgcagcacctggctaagaatgtagtcatggtaaatcaaggacttacaaagcacatgactgtcaagaacaagtatgccacatcgaagcatgctaagatcagcactctaccacagctgaattctgcactagttcaagatttagccaaggctgtggcaaaggtgtaacttgtaaacttgagttggagtactatatttacaaataaaattggcaccatgtgccatctgtacatattactgttgcatttacttttaataaagcttgtggccccttttacttttttatagcttaactaatttgaatgtggttacttcctactgtagggtagcggaaaagttgtcttaaaaggtatggtggggatatttttaaaaactccttttggtttacctggggatccaattgatgtatatgtttatatactgggttcttgttttatatacctggcttttactttattaatatgagttactgaaggtgatggaggtatttgaaaattttacttccataggacatactgcatgtaagccaagtcatggagaatctgctgcatagctctattttaaagtaaaagtctaccaccgaatccctagtccccctgttttctgtttcttcttgtgattgctgccataattctaagttatttacttttaccactatttaagttatcaactttagctagtatcttcaaactttcactttgaaaaatgagaattttatattctaagccagttttcattttggttttgtgttttggttaataaaacaatactcaaatacaaaa

SEQ ID NO: 118 - DNA, 2029 bp, Homo sapiens
  source 1..2029: mol_type = genomic DNA
ggcgtgctgcggcggaacggctgttggtttctgctgggtgtaggtccttggctggtcgggcctccggtgttctgcttctccccgctgagctgctgcctggtgaagaggaagccatggcgctccgagtcaccaggaactcgaaaattaatgctgaaaataaggcgaagatcaacatggcaggcgcaaagcgcgttcctacggcccctgctgcaacctccaagcccggactgaggccaagaacagctcttggggacattggtaacaaagtcagtgaacaactgcaggccaaaatgcctatgaagaaggaagcaaaaccttcagctactggaaaagtcattgataaaaaactaccaaaacctcttgaaaaggtacctatgctggtgccagtgccagtgtctgagccagtgccagagccagaacctgagccagaacctgagcctgttaaagaagaaaaactttcgcctgagcctattttggttgatactgcctctccaagcccaatggaaacatctggatgtgcccctgcagaagaagacctgtgtcaggctttctctgatgtaattcttgcagtaaatgatgtggatgcagaagatggagctgatccaaacctttgtagtgaatatgtgaaagatatttatgcttatctgagacaacttgaggaagagcaagcagtcagaccaaaatacctactgggtcgggaagtcactggaaacatgagagccatcctaattgactggctagtacaggttcaaatgaaattcaggttgttgcaggagaccatgtacatgactgtctccattattgatcggttcatgcagaataattgtgtgcccaagaagatgctgcagctggttggtgtcactgccatgtttattgcaagcaaatatgaagaaatgtaccctccagaaattggtgactttgcttttgtgactgacaacacttatactaagcaccaaatcagacagatggaaatgaagattctaagagctttaaactttggtctgggtcggcctctacctttgcacttccttcggagagcatctaagattggagaggttgatgtcgagcaacatactttggccaaatacctgatggaactaactatgttggactatgacatggtgcactttcctccttctcaaattgcagcaggagctttttgcttagcactgaaaattctggataatggtgaatggacaccaactctacaacattacctgtcatatactgaagaatctcttcttccagttatgcagcacctggctaagaatgtagtcatggtaaatcaaggacttacaaagcacatgactgtcaagaacaagtatgccacatcgaagcatgctaagatcagcactctaccacagctgaattctgcactagttcaagatttagccaaggctgtggcaaaggtgtaacttgtaaacttgagttggagtactatatttacaaataaaattggcaccatgtgccatctgtacatattactgttgcatttacttttaataaagcttgtggccccttttacttttttatagcttaactaatttgaatgtggttacttcctactgtagggtagcggaaaagttgtcttaaaaggtatggtggggatatttttaaaaactccttttggtttacctggggatccaattgatgtatatgtttatatactgggttcttgttttatatacctggcttttactttattaatatgagttactgaaggtgatggaggtatttgaaaattttacttccataggacatactgcatgtaagccaagtcatggagaatctgctgcatagctctattttaaagtaaaagtctaccaccgaatccctagtccccctgttttctgtttcttcttgtgattgctgccataattctaagttatttacttttaccactatttaagttatcaactttagctagtatcttcaaactttcactttgaaaaatgagaattttatattctaagccagttttcattttggttttgtgttttggttaataaaacaatactcaaatacaaaa

SEQ ID NO: 119 - DNA, 2058 bp, Homo sapiens
  source 1..2058: mol_type = genomic DNA
cgaacgccttcgcgcgatcgccctggaaacgcattctctgcgaccggcagccgccaatgggaagggagtgagtgccacgaacaggccaataaggagggagcagtgcggggtttaaatctgaggctaggctggctcttctcggcgtgctgcggcggaacggctgttggtttctgctgggtgtaggtccttggctggtcgggcctccggtgttctgcttctccccgctgagctgctgcctggtgaagaggaagccatggcgctccgagtcaccaggaactcgaaaattaatgctgaaaataaggcgaagatcaacatggcaggcgcaaagcgcgttcctacggcccctgctgcaacctccaagcccggactgaggccaagaacagctcttggggacattggtaacaaagtcagtgaacaactgcaggccaaaatgcctatgaagaaggaagcaaaaccttcagctactggaaaagtcattgataaaaaactaccaaaacctcttgaaaaggtacctatgctggtgccagtgccagtgtctgagccagtgccagagccagaacctgagccagaacctgagcctgttaaagaagaaaaactttcgcctgagcctattttggttgatactgcctctccaagcccaatggaaacatctggatgtgcccctgcagaagaagacctgtgtcaggctttctctgatgtaattcttgcagtaaatgatgtggatgcagaagatggagctgatccaaacctttgtagtgaatatgtgaaagatatttatgcttatctgagacaacttgaggaagagcaagcagtcagaccaaaatacctactgggtcgggaagtcactggaaacatgagagccatcctaattgactggctagtacaggttcaaatgaaattcaggttgttgcaggagaccatgtacatgactgtctccattattgatcggttcatgcagaataattgtgtgcccaagaagatgctgcagctggttggtgtcactgccatgtttattgcaagcaaatatgaagaaatgtaccctccagaaattggtgactttgcttttgtgactgacaacacttatactaagcaccaaatcagacagatggaaatgaagattctaagagctttaaactttggtctgggtcggcctctacctttgcacttccttcggagagcatctaagattggagaggttgatgtcgagcaacatactttggccaaatacctgatggaactaactatgttggactatgacatggtgcactttcctccttctcaaattgcagcaggagctttttgcttagcactgaaaattctggataatggtgaatggactgtcaagaacaagtatgccacatcgaagcatgctaagatcagcactctaccacagctgaattctgcactagttcaagatttagccaaggctgtggcaaaggtgtaacttgtaaacttgagttggagtactatatttacaaataaaattggcaccatgtgccatctgtacatattactgttgcatttacttttaataaagcttgtggccccttttacttttttatagcttaactaatttgaatgtggttacttcctactgtagggtagcggaaaagttgtcttaaaaggtatggtggggatatttttaaaaactccttttggtttacctggggatccaattgatgtatatgtttatatactgggttcttgttttatatacctggcttttactttattaatatgagttactgaaggtgatggaggtatttgaaaattttacttccataggacatactgcatgtaagccaagtcatggagaatctgctgcatagctctattttaaagtaaaagtctaccaccgaatccctagtccccctgttttctgtttcttcttgtgattgctgccataattctaagttatttacttttaccactatttaagttatcaactttagctagtatcttcaaactttcactttgaaaaatgagaattttatattctaagccagttttcattttggttttgtgttttggttaataaaacaatactcaaatacaaaa

SEQ ID NO: 120 - DNA, 2828 bp, Homo sapiens
  source 1..2828: mol_type = genomic DNA
cgcacgcgcggttagtagtcgctgctgcgcggccgccggcgggactggtctgaagagacgcggggaccaagtggcaacgacttggacatctgagctgtcactgccgaaaacaggccgcaagagagcatctgcccaagcaacaaagaggaggtgtttgcttgggagttaaaagcaaatggcaaccaaagctcaggactgggagagaaaagataatcaatatgcatttccaagccttttggctatgtttgggtcttctgttcatctcaattaatgcagaatttatggatgatgatgttgagacggaagactttgaagaaaattcagaagaaattgatgttaatgaaagtgaactttcctcagagattaaatataagacacctcaacctataggagaagtatattttgcagaaacttttgatagtggaaggttggctggatgggtcttatcaaaagcaaagaaagatgacatggatgaggaaatttcaatatacgatggaagatgggaaattgaagagttgaaagaaaaccaggtacctggtgacagaggactggtattaaaatctagagcaaagcatcatgcaatatctgctgtattagcaaaaccattcatttttgctgataaacccttgatagttcaatatgaagtaaattttcaagatggtattgattgtggaggtgcatacattaaactcctagcagacactgatgatttgattctggaaaacttttatgataaaacatcctatatcattatgtttggaccagataaatgtggagaagattataaacttcattttatcttcagacataaacatcccaaaactggagttttcgaagagaaacatgccaaacctccagatgtagaccttaaaaagttctttacagacaggaagactcatctttatacccttgtgatgaatccagatgacacatttgaggtgttagttgatcaaacagttgtaaacaaaggaagcctcctagaggatgtggttcctcctatcaaacctcccaaagaaattgaagatcccaatgataaaaaacctgaggaatgggatgaaagagcaaaaattcctgatccttctgccgtcaaaccagaagactgggatgaaagtgaacctgcccaaatagaagattcaagtgttgttaaacctgctggctggcttgatgatgaaccaaaatttatccctgatcctaatgctgaaaaacctgatgactggaatgaagacacggatggagaatgggaggcacctcagattcttaatccagcatgtcggattgggtgtggtgagtggaaacctcccatgatagataacccaaaatacaaaggagtatggagacctccactggtcgataatcctaactatcagggaatctggagtcctcgaaaaattcctaatccagattatttcgaagatgatcatccatttcttctgacttctttcagtgctcttggtttagagctttggtctatgacctctgatatctactttgataattttattatctgttcggaaaaggaagtagcagatcactgggctgcagatggttggagatggaaaataatgatagcaaatgctaataagcctggtgtattaaaacagttaatggcagctgctgaagggcacccatggctttggttgatttatcttgtgacagcaggagtgccaatagcattaattacttcattttgttggccaagaaaagtaaagaaaaaacataaagatacagagtataaaaaaaccgacatatgtataccacaaacaaaaggagtactagagcaagaagaaaaggaagagaaagcagccctggaaaaaccaatggacctggaagaggaaaaaaagcaaaatgatggtgaaatgcttgaaaaagaagaggaaagtgaacctgaggaaaagagtgaagaagaaattgaaatcatagaagggcaagaagaaagtaatcaatcaaataagtctgggtcagaggatgagatgaaagaagcagatgagagcacaggatctggagatgggccgataaagtcagtacgcaaaagaagagtacgaaaggactaaactagattgaaatatttttaattcccgagagggatgtttggcattgtaaaaatcagcatgccagacctgaactttaatcagtctgcacatcctgtttctaatatctagcaacattatattctttcagacatttattttagtccttcatttcagaggaaaaagaagcaactttgaagttacctcatctttgaatttagaataaaagtggcacattacatatcggatctaagagattaataccattagaagttacacagttttagttgtttggagatagttttggtttgtacagaacaaaataatatgtagcagcttcattgctattggaaaaatcagttattggaatttccacttaaatggctatacaacaatataactggtagttctataataaaaatgagcatatgttctgttgtgaagagctaaatgcaataaagtttctgtatggttgtttgattctatcaacaattgaaagtgttgtatatgacccacatttacctagtttgtgtcaaattatagttacagtgagttgtttgcttaaattatagattcctttaaggacatgccttgttcataaaatcactggattatattgcagcatattttacatttgaatacaaggataatgggttttatcaaaacaaaatgatgtacagattttttttcaagtttttatagttgctttatgccagagtggtttaccccattcacaaaatttcttatgcatacattgctattgaaaataaaatttaaatattttttcatcctgaaaaaaaa

SEQ ID NO: 121 - DNA, 2725 bp, Homo sapiens
  source 1..2725: mol_type = genomic DNA
agtagtcgctgctgcgcggccgccggcgggactggtctgaagagacgcggggaccaagtggcaacgacttggacatctgagctgtcactgccgaaaacaggccgcaagagagataatcaatatgcatttccaagccttttggctatgtttgggtcttctgttcatctcaattaatgcagaatttatggatgatgatgttgagacggaagactttgaagaaaattcagaagaaattgatgttaatgaaagtgaactttcctcagagattaaatataagacacctcaacctataggagaagtatattttgcagaaacttttgatagtggaaggttggctggatgggtcttatcaaaagcaaagaaagatgacatggatgaggaaatttcaatatacgatggaagatgggaaattgaagagttgaaagaaaaccaggtacctggtgacagaggactggtattaaaatctagagcaaagcatcatgcaatatctgctgtattagcaaaaccattcatttttgctgataaacccttgatagttcaatatgaagtaaattttcaagatggtattgattgtggaggtgcatacattaaactcctagcagacactgatgatttgattctggaaaacttttatgataaaacatcctatatcattatgtttggaccagataaatgtggagaagattataaacttcattttatcttcagacataaacatcccaaaactggagttttcgaagagaaacatgccaaacctccagatgtagaccttaaaaagttctttacagacaggaagactcatctttatacccttgtgatgaatccagatgacacatttgaggtgttagttgatcaaacagttgtaaacaaaggaagcctcctagaggatgtggttcctcctatcaaacctcccaaagaaattgaagatcccaatgataaaaaacctgaggaatgggatgaaagagcaaaaattcctgatccttctgccgtcaaaccagaagactgggatgaaagtgaacctgcccaaatagaagattcaagtgttgttaaacctgctggctggcttgatgatgaaccaaaatttatccctgatcctaatgctgaaaaacctgatgactggaatgaagacacggatggagaatgggaggcacctcagattcttaatccagcatgtcggattgggtgtggtgagtggaaacctcccatgatagataacccaaaatacaaaggagtatggagacctccactggtcgataatcctaactatcagggaatctggagtcctcgaaaaattcctaatccagattatttcgaagatgatcatccatttcttctgacttctttcagtgctcttggtttagagctttggtctatgacctctgatatctactttgataattttattatctgttcggaaaaggaagtagcagatcactgggctgcagatggttggagatggaaaataatgatagcaaatgctaataagcctggtgtattaaaacagttaatggcagctgctgaagggcacccatggctttggttgatttatcttgtgacagcaggagtgccaatagcattaattacttcattttgttggccaagaaaagtaaagaaaaaacataaagatacagagtataaaaaaaccgacatatgtataccacaaacaaaaggagtactagagcaagaagaaaaggaagagaaagcagccctggaaaaaccaatggacctggaagaggaaaaaaagcaaaatgatggtgaaatgcttgaaaaagaagaggaaagtgaacctgaggaaaagagtgaagaagaaattgaaatcatagaagggcaagaagaaagtaatcaatcaaataagtctgggtcagaggatgagatgaaagaagcagatgagagcacaggatctggagatgggccgataaagtcagtacgcaaaagaagagtacgaaaggactaaactagattgaaatatttttaattcccgagagggatgtttggcattgtaaaaatcagcatgccagacctgaactttaatcagtctgcacatcctgtttctaatatctagcaacattatattctttcagacatttattttagtccttcatttcagaggaaaaagaagcaactttgaagttacctcatctttgaatttagaataaaagtggcacattacatatcggatctaagagattaataccattagaagttacacagttttagttgtttggagatagttttggtttgtacagaacaaaataatatgtagcagcttcattgctattggaaaaatcagttattggaatttccacttaaatggctatacaacaatataactggtagttctataataaaaatgagcatatgttctgttgtgaagagctaaatgcaataaagtttctgtatggttgtttgattctatcaacaattgaaagtgttgtatatgacccacatttacctagtttgtgtcaaattatagttacagtgagttgtttgcttaaattatagattcctttaaggacatgccttgttcataaaatcactggattatattgcagcatattttacatttgaatacaaggataatgggttttatcaaaacaaaatgatgtacagattttttttcaagtttttatagttgctttatgccagagtggtttaccccattcacaaaatttcttatgcatacattgctattgaaaataaaatttaaatattttttcatcctgaa

SEQ ID NO: 122 - DNA, 3108 bp, Homo sapiens
  source 1..3108: mol_type = genomic DNA
actcccacgcgcctccgccccgccagcctcatttctggcgcgctctccccgtggctccgcaagatggcggcgggcctgctgagggacttgccttcttaaacttcgagggccggagcttccttaggaagtggttccctcctggtccctgtacttggtggggtgggcggggttcgtgggggcctcagcgtggggtgtggggcgtcctgaaggcatggccctgtagctgagggggctgggccggaagtgcctctggtcccctcgcgcctgtcagctgcgggggacttgctgatggcggctccctcgtgtggcggcgacagaaaagctcgcctgacgccatctttgccgcacgagtctactgcaaatcctgaaactccaaactcaaccatctccagagaggccagcacccagtcctcatcagctgcaaccagccaaggctatattttaccagaaggcaaaatcatgccaaacactgtttttgttggaggaattgatgttaggatggatgaaactgagattagaagcttctttgctagatatggttcagtgaaagaagtgaagataatcactgatcgaactggtgtgtccaaaggctatggatttgtttcattttttaatgacgtggatgtgcagaagatagtagaatcacagataaatttccatggtaaaaagctgaagctgggccctgcaatcaggaaacaaaatttatgtgcttatcatgtgcagccacgtcctttggtttttaatcatcctcctccaccacagtttcagaatgtctggactaatccaaacactgaaacttatatgcagcccacaaccacgatgaatcctataactcagtatgttcaggcatatcctacttacccaaattcaccagttcaggtcatcactggatatcagttgcctgtatataattatcagatgccaccacagtggcctgttggggagcaaaggagctatgttgtacctccggcttattcagctgttaactaccactgtaatgaagttgatccaggagctgaagttgtgccaaatgaatgttcagttcatgaagctactccaccctctggaaatggcccacaaaagaaatctgtggaccgaagcatacaaacggtggtatcttgtctgtttaatccagagaacagactgagaaactctgttgttactcaagatgactacttcaaggataaaagagtgcatcactttagaagaagtcgggcaatgcttaaatctgtttgatcctcctggcttatctagttacatgggaagttgctggttttgaatattaagctaaaaggtttccactattatagaaattctgaattttggtaaatcacactcaaactttgtgtataagttgtattattagactctctagttttatcttaaactgttcttcattagatgtttatttagaaactggttctgtgttgaaatatagttgaaagtaaaaaaataattgagactgaaagaaactaagatttatctgcaaggattttttaaaaattggcattttaagtgtttaaaagcaaatactgattttcaaaaaaatgtttttaaaaacctattttgaaaggtcagaattttgttggtctgaatacaaacatttcacttctccaacaagtacctgtgaacagtacagtatttacagtattgagctttgcatttatgatttctccagaaatttaccacaaaagcaaaatttttaaaactgcatttttaatcagtggaactcaatatatagttagctttattgaagtcttcttatctaaacccagcaaaacagattcaaagcgaacagtccaatcagtgggtcatatgtttattcaaaatattttatcttttagctagaatccacacatatatatcctatttgattagggtagtaattaggataactaaaattctgggcctaattttttaaagaatccaagacaaactaaactttactaggtacataagcttctcaatgagtcaccattcttcttttttgtaaaaacttttttctttgaaatgctaaacttggctgtatgtcaaattgtgcaaaatattggtattaaagaatgctgcaacttttttatgtctcttagaggttaatcagagtatctgaagggaattgtttttataaaaacattgaaatattagttacttgctataaatagatttagtctgttatatttccttttgtaaagtaaaatatgtccagaagagtcaaagtagttagttttggttatttctaaaccacaaaagttgtttaataagtatatcttaagaatgtgctagagttaaaagttagcattgtttctagattagctggtgtcttcattttacattgtgacaaacagctagagcatcagagcccttttgctataccacagtctttcgtttccagcctttgtcactagtctttgaggaggtttgctcctagaactggtgatataaagaatgaaagtagctgtatgagcagagcagttcaagggccaaaccctggaacggtagcaatgggatataatacctttctaagggaaaaagttgtatcagtaccatttgatctgccatggacatgagtttaaagcggctttctggcccttctttcagtgacttcttccctaaaatgtagaaattctaacttaatgtagttactgtgagccatattactagtgccccctagggtctataattccttaaaattttcattctgaatctgaaggagagagtcttttaactttagaattcccaagagggctttattacacctcagaaattgaaagcactatgaatttgtccatttaaaaatgatctgtagtttttttggtgctataacattctgacacatatcattctgtgattaaatctccagcttactataaatgatatctatattctaaagagctacttctaattattccaatatgaccttaaggaaaagtaagggaataaatttttgtctttgttggagtgaagcatttaaaagagtaagggtaaaaaagataaagtcctgaacctttcaaaatggaaaattaattctaaacttagaaatatgcttctgcctattgctgatactgtctttgcatacatgaataaaaataaagtttttttcttcaaaaaaaa

SEQ ID NO: 123 - DNA, 3054 bp, Homo sapiens
  source 1..3054: mol_type = genomic DNA
attggctgaggccgataccacgcgccccgatacccggcgcaggagccacctccctgagccccgcggaccacgcctcagtccgcctgcgctcctcagcctgacggtccgcctttcggggctcctcagccttgtcacccgctcttggttttccttttctcttcatctttggctcctttgaccactcgaagccgcgcagcgggttccagcggacctcacagcagccccagaagtggtgcgccaagcacagcctctgctcctcctggagccggtcgggaactgctgcctgccgccatcatgtctactgcaaatcctgaaactccaaactcaaccatctccagagaggccagcacccagtcctcatcagctgcaaccagccaaggctatattttaccagaaggcaaaatcatgccaaacactgtttttgttggaggaattgatgttaggatggatgaaactgagattagaagcttctttgctagatatggttcagtgaaagaagtgaagataatcactgatcgaactggtgtgtccaaaggctatggatttgtttcattttttaatgacgtggatgtgcagaagatagtagaatcacagataaatttccatggtaaaaagctgaagctgggccctgcaatcaggaaacaaaatttatgtgcttatcatgtgcagccacgtcctttggtttttaatcatcctcctccaccacagtttcagaatgtctggactaatccaaacactgaaacttatatgcagcccacaaccacgatgaatcctataactcagtatgttcaggcatatcctacttacccaaattcaccagttcaggtcatcactggatatcagttgcctgtatataattatcagatgccaccacagtggcctgttggggagcaaaggagctatgttgtacctccggcttattcagctgttaactaccactgtaatgaagttgatccaggagctgaagttgtgccaaatgaatgttcagttcatgaagctactccaccctctggaaatggcccacaaaagaaatctgtggaccgaagcatacaaacggtggtatcttgtctgtttaatccagagaacagactgagaaactctgttgttactcaagatgactacttcaaggataaaagagtgcatcactttagaagaagtcgggcaatgcttaaatctgtttgatcctcctggcttatctagttacatgggaagttgctggttttgaatattaagctaaaaggtttccactattatagaaattctgaattttggtaaatcacactcaaactttgtgtataagttgtattattagactctctagttttatcttaaactgttcttcattagatgtttatttagaaactggttctgtgttgaaatatagttgaaagtaaaaaaataattgagactgaaagaaactaagatttatctgcaaggattttttaaaaattggcattttaagtgtttaaaagcaaatactgattttcaaaaaaatgtttttaaaaacctattttgaaaggtcagaattttgttggtctgaatacaaacatttcacttctccaacaagtacctgtgaacagtacagtatttacagtattgagctttgcatttatgatttctccagaaatttaccacaaaagcaaaatttttaaaactgcatttttaatcagtggaactcaatatatagttagctttattgaagtcttcttatctaaacccagcaaaacagattcaaagcgaacagtccaatcagtgggtcatatgtttattcaaaatattttatcttttagctagaatccacacatatatatcctatttgattagggtagtaattaggataactaaaattctgggcctaattttttaaagaatccaagacaaactaaactttactaggtacataagcttctcaatgagtcaccattcttcttttttgtaaaaacttttttctttgaaatgctaaacttggctgtatgtcaaattgtgcaaaatattggtattaaagaatgctgcaacttttttatgtctcttagaggttaatcagagtatctgaagggaattgtttttataaaaacattgaaatattagttacttgctataaatagatttagtctgttatatttccttttgtaaagtaaaatatgtccagaagagtcaaagtagttagttttggttatttctaaaccacaaaagttgtttaataagtatatcttaagaatgtgctagagttaaaagttagcattgtttctagattagctggtgtcttcattttacattgtgacaaacagctagagcatcagagcccttttgctataccacagtctttcgtttccagcctttgtcactagtctttgaggaggtttgctcctagaactggtgatataaagaatgaaagtagctgtatgagcagagcagttcaagggccaaaccctggaacggtagcaatgggatataatacctttctaagggaaaaagttgtatcagtaccatttgatctgccatggacatgagtttaaagcggctttctggcccttctttcagtgacttcttccctaaaatgtagaaattctaacttaatgtagttactgtgagccatattactagtgccccctagggtctataattccttaaaattttcattctgaatctgaaggagagagtcttttaactttagaattcccaagagggctttattacacctcagaaattgaaagcactatgaatttgtccatttaaaaatgatctgtagtttttttggtgctataacattctgacacatatcattctgtgattaaatctccagcttactataaatgatatctatattctaaagagctacttctaattattccaatatgaccttaaggaaaagtaagggaataaatttttgtctttgttggagtgaagcatttaaaagagtaagggtaaaaaagataaagtcctgaacctttcaaaatggaaaattaattctaaacttagaaatatgcttctgcctattgctgatactgtctttgcatacatgaataaaaataaagtttttttcttcaaaaaaaa

SEQ ID NO: 124 - DNA, 2269 bp, Homo sapiens
  source 1..2269: mol_type = genomic DNA
gccaaaccctgtggtcaacggcgcgcgggtctccaggctccgtgttctaggcccgagttagaatcctgtcagctgaggaggtcgggcggggcagaggggcttcaccttgaaaatctcggggagactgtgggtacgagggggaagtgattatttttctgttgcccacttttcaatatgaaggaggatcaagttgtggcggaagaaccaggattccaagatgaagaggaatctttgtttcaagatattgacctgttacagaaacatggaattaacgtggctgacattaagaaactgaaatcagtaggaatctgtaccatcaaaggtatacagatgacaacaagaagagctctatgcaatgtcaaaggactctcagaagccaaagtagacaagattaaagaggcagcgaacaaactaattgaaccaggattcttgactgcatttgagtatagtgaaaagaggaaaatggttttccatatcaccaccgggagccaggaatttgataagttactaggaggtggaattgaaagtatggcaattacagaagcttttggagaatttcgtactggaaaaacccagctttctcataccctctgtgtgacagctcaacttccaggagctggtggctacccaggaggaaagattatcttcattgatacagaaaatactttccgtccagatcgccttagggacattgctgatcgctttaatgtagaccatgatgcagtactggacaacgtactttatgcacgtgcatatactagtgaacatcagatggagctacttgattatgtagcagcaaagttccatgaagaagctggcatcttcaagctattgattatcgattcaataatggcactttttcgagtggatttcagtggccgtggggagttggccgaacggcagcaaaaattggcccagatgttgtcacgactccaaaaaatctcagaagaatataacgtggctgtttttgtgaccaatcaaatgactgccgatccaggagcaactatgacctttcaggcagatcccaaaaaacccattgggggacacattctggctcatgcttcaacaacaagaataagcttgcgaaagggaagaggagagctcagaattgccaagatttatgacagtcctgagatgcctgaaaatgaagccaccttcgcaataactgctggaggaattggggatgccaaggagtaggtggtgaattgatgcaaattgcttcttagtgcttattaggagctgaagaaatggaaaagcagtctccaatttcacatcttgaaatagaggttttttcccacatgttactaaagaaaagtcagcaaagagatttaaatcttatatttatcttaaaagtccctgatttatgataactatacattgtatgtaaattcagggatatgtatatgtatgtttgtgtgtgtgtgtgtttgtgtgtgtatacctgacatatatagtagatatatatacctattgaaattctctcactctgtgtatgtatatatacctatggaaaactagttgttgggaaaggagtacgtgattccctccctttcacttttcaaagtgagccactaaacagaaagtctaagagttcagaaatgtcccattctcctaaggactttcccttcaccatttttctagggtatagtgccactgacttacatagctagatgtttttccacaagaggatttaagggaggaatgtttataggacacacacacaaaagctctttctatttataatatcaaactgcatattcacctttatagcaacagaaaacagacattaaattaagccaaattttaaatcatttgactttgacaagcagaaattacttttaaaaaatgtatttatggctgggcgtggtggctcacacctgtaatcccagcactttgggaggccgaggcaggtggatcacttgaggtcaggagttcaagaccagcctggccaacatggagaaaccccatctctactaaaaatacaaaaattagccaagtgcagtggcatgtgcttgtaatcccagctactctggaggctgaggcaggagaattgcttgaacccaggaggcagagattgcggtgagccaagatggcaccactgcactccagcctaggtgacagagtgagactccgtctcaaaaaaaaaaaaaaaacttttttaaaatgttaaaattaatttaaatgtaaaatttctgaatactaatcttagaaatgtgtaaaagatattattttgattgttaaacaaataaaatcctgttttcaaaatgca

SEQ ID NO: 125 - DNA, 2116 bp, Homo sapiens
  source 1..2116: mol_type = genomic DNA
ctcctcgtttggcgccaaaccctgtggtcaacggcgcgcgggtctccaggctccgtgttctaggcccgagttagaatcctgtcagctgaggaggtcgggcggggcagaggggcttcaccttgaaaatctcggggagactgtgggtacgagggggaagtgattatttttctgttgcccacttttcaatatgaaggaggatcaagttgtggcggaagaaccaggattccaagatgaagaggaatctttgtttcaagatattgacctgttacagaaacatggaattaacgtggctgacattaagaaactgaaatcagtaggaatctgtaccatcaaaggtatacagatgacaacaagaagagctctatgcaatgtcaaaggactctcagaagccaaagtagacaagattaaagaggcagcgaacaaactaattgaaccaggattcttgactgcatttgagtatagtgaaaagaggaaaatggttttccatatcaccaccgggagccaggaatttgataagttactaggaggtggaattgaaagtatggcaattacagaagcttttggagaatttcgtactggaaaaacccagctttctcataccctctgtggtgaacatcagatggagctacttgattatgtagcagcaaagttccatgaagaagctggcatcttcaagctattgattatcgattcaataatggcactttttcgagtggatttcagtggccgtggggagttggccgaacggcagcaaaaattggcccagatgttgtcacgactccaaaaaatctcagaagaatataacgtggctgtttttgtgaccaatcaaatgactgccgatccaggagcaactatgacctttcaggcagatcccaaaaaacccattgggggacacattctggctcatgcttcaacaacaagaataagcttgcgaaagggaagaggagagctcagaattgccaagatttatgacagtcctgagatgcctgaaaatgaagccaccttcgcaataactgctggaggaattggggatgccaaggagtaggtggtgaattgatgcaaattgcttcttagtgcttattaggagctgaagaaatggaaaagcagtctccaatttcacatcttgaaatagaggttttttcccacatgttactaaagaaaagtcagcaaagagatttaaatcttatatttatcttaaaagtccctgatttatgataactatacattgtatgtaaattcagggatatgtatatgtatgtttgtgtgtgtgtgtgtttgtgtgtgtatacctgacatatatagtagatatatatacctattgaaattctctcactctgtgtatgtatatatacctatggaaaactagttgttgggaaaggagtacgtgattccctccctttcacttttcaaagtgagccactaaacagaaagtctaagagttcagaaatgtcccattctcctaaggactttcccttcaccatttttctagggtatagtgccactgacttacatagctagatgtttttccacaagaggatttaagggaggaatgtttataggacacacacacaaaagctctttctatttataatatcaaactgcatattcacctttatagcaacagaaaacagacattaaattaagccaaattttaaatcatttgactttgacaagcagaaattacttttaaaaaatgtatttatggctgggcgtggtggctcacacctgtaatcccagcactttgggaggccgaggcaggtggatcacttgaggtcaggagttcaagaccagcctggccaacatggagaaaccccatctctactaaaaatacaaaaattagccaagtgcagtggcatgtgcttgtaatcccagctactctggaggctgaggcaggagaattgcttgaacccaggaggcagagattgcggtgagccaagatggcaccactgcactccagcctaggtgacagagtgagactccgtctcaaaaaaaaaaaaaaaacttttttaaaatgttaaaattaatttaaatgtaaaatttctgaatactaatcttagaaatgtgtaaaagatattattttgattgttaaacaaataaaatcctgttttcaaaatgc

SEQ ID NO: 126 - DNA, 2082 bp, Homo sapiens
  source 1..2082: mol_type = genomic DNA
ctcatctttccaagctaaatgcttctcttactgtccttctagtccttgttgactttgaaatgaaatcagaggcccctggacaaaggactacttcttacataatatttcttattttcccagaagtgattatttttctgttgcccacttttcaatatgaaggaggatcaagttgtggcggaagaaccaggattccaagatgaagaggaatctttgtttcaagatattgacctgttacagaaacatggaattaacgtggctgacattaagaaactgaaatcagtaggaatctgtaccatcaaaggtatacagatgacaacaagaagagctctatgcaatgtcaaaggactctcagaagccaaagtagacaagattaaagaggcagcgaacaaactaattgaaccaggattcttgactgcatttgagtatagtgaaaagaggaaaatggttttccatatcaccaccgggagccaggaatttgataagttactaggaggtggaattgaaagtatggcaattacagaagcttttggagaatttcgtactggaaaaacccagctttctcataccctctgtggtgaacatcagatggagctacttgattatgtagcagcaaagttccatgaagaagctggcatcttcaagctattgattatcgattcaataatggcactttttcgagtggatttcagtggccgtggggagttggccgaacggcagcaaaaattggcccagatgttgtcacgactccaaaaaatctcagaagaatataacgtggctgtttttgtgaccaatcaaatgactgccgatccaggagcaactatgacctttcaggcagatcccaaaaaacccattgggggacacattctggctcatgcttcaacaacaagaataagcttgcgaaagggaagaggagagctcagaattgccaagatttatgacagtcctgagatgcctgaaaatgaagccaccttcgcaataactgctggaggaattggggatgccaaggagtaggtggtgaattgatgcaaattgcttcttagtgcttattaggagctgaagaaatggaaaagcagtctccaatttcacatcttgaaatagaggttttttcccacatgttactaaagaaaagtcagcaaagagatttaaatcttatatttatcttaaaagtccctgatttatgataactatacattgtatgtaaattcagggatatgtatatgtatgtttgtgtgtgtgtgtgtttgtgtgtgtatacctgacatatatagtagatatatatacctattgaaattctctcactctgtgtatgtatatatacctatggaaaactagttgttgggaaaggagtacgtgattccctccctttcacttttcaaagtgagccactaaacagaaagtctaagagttcagaaatgtcccattctcctaaggactttcccttcaccatttttctagggtatagtgccactgacttacatagctagatgtttttccacaagaggatttaagggaggaatgtttataggacacacacacaaaagctctttctatttataatatcaaactgcatattcacctttatagcaacagaaaacagacattaaattaagccaaattttaaatcatttgactttgacaagcagaaattacttttaaaaaatgtatttatggctgggcgtggtggctcacacctgtaatcccagcactttgggaggccgaggcaggtggatcacttgaggtcaggagttcaagaccagcctggccaacatggagaaaccccatctctactaaaaatacaaaaattagccaagtgcagtggcatgtgcttgtaatcccagctactctggaggctgaggcaggagaattgcttgaacccaggaggcagagattgcggtgagccaagatggcaccactgcactccagcctaggtgacagagtgagactccgtctcaaaaaaaaaaaaaaaacttttttaaaatgttaaaattaatttaaatgtaaaatttctgaatactaatcttagaaatgtgtaaaagatattattttgattgttaaacaaataaaatcctgttttcaaaatgc

SEQ ID NO: 127 - DNA, 14639 bp, Homo sapiens
  source 1..14639: mol_type = genomic DNA
cccggggcagcgcaaccgctggggccggcctcagtgggctgagtggtcggggcatcggggcccagagagcggctggtttcgaagtataaagcattccgcacgacgggggatggagaaggatgctgaagatggcgccccttctgagggagcagaggctcctccctctacggaagaggctgcccctccccgttcagaagaggaagaggccccgcgccctccgacagtggaggccccggcagaagatggtttctctccttccgcagaagatgctgtttcttctgtggtggattatcgggatctcattccttctgaagaagggatagttcttccagatgatcatgaagcggatctgaatagagttcgacagaggcttgcaccgcgaccggttcagtcagtgatttcggaagtgctgtccttgccgtcttcccggaggtcctccagataccgccggagtatgagtggccttcccaatctacaggaaacattaaaagagagacaggcaagatttagagaggcaagggaaagccgaagactgaaaattgacccttcatacaaatatatatttgaaattctagcagaaaatcttggcctggacatagtaactgttgaagaattaattttggattgcccatctctggaagcatttactaatttttttgcgaaagatggttgtaagacactgaaatttttgtaccaagaaggagatgtacctggtattgaatgtggtcgaactattgctggagcaactaaaggggcaaaaatgatgaaattgtatatagacaatgcagccccggataaactaaaaggactgtgcatattttttgttcgttgccgtaatgatgttgctataaatgttaaaactattcaagaggaagcgctctttactgttctggatgcgtcgaaaggactcttaaatggaattagggatatgttggcaaatatatttctaccagctgttcttgcaacaaacaactggggtgctttaaaccagtccaagcagggagaatctgaaaaacatattttcactgaaaccatcaacagatatctttcatttttagatggtgctagaataagtattgagggaacagtgaagttaaagacaatagacaatgttaatttttccaaactgcacacctttgaagaagtaactgctgcagccagcaactcagaaactgttcatcagctggaggaagtgctgatggtatggtacaaacagatcgaacaggtacttattgagagtgagcagatgagaaaagaagctggtgattcaggtccactcactgaattggaacactggaaacgcatgtcagccaagttcaactatatcattgagcagattaaagggccaagttgtaaggctgtcataaatgtgctaaatgttgcacactccaaactgctaaagaattggcgtgatttggatgcaagaatcactgatacagcaaatgaatccaaagataatgtcagatatttgtatactttggaaaaagtgtgtcaacctctctataaccatgacctagtttccatggcacatggaatacaaaatttgattaatgccatcagaatgattcacggtgtgtcaaggtattataatacctcagagagaatgacctcattgtttatcaaggtaacaaatcaaatggtaacagcatgtaaagcatatattactgatggaggattaaaccatgtatgggatcaggaaacgccagttgtactaaagaaaattcaggactgcatttttctattcaaggaatatcaggcatcttttcataaaacaaggaaactgatttcagaatcctcaggggaaaaatcttttgaggtttcagaaatgtatatatttggaaaatttgaagctttttgcaaaagactggagaagattacagaaatgataactgttgtgcaaacatattcaaccttgagtaattctaccatagaaggaatagatattatggcaataaaattcagaaatatataccaaggggttaagaaaaagcaatatgacattctggatccaagaaggacagaatttgacacagatttcttagatttcatgacaaaaatcaatggtttagaggtacaaatacaggcatttatgaacagtagttttgggaaaatcttatcttctcagcaggctcttcagctacttcaaaggtttcagaagctgaacattccctgtctgggattagaaataaaccacacaatagagcgtattcttcagtactatgtggctgaacttgatgctactaagaagctttatcattctcagaaagatgacccccctcttgctcgcaacatgccccctatagcaggaaaaatactctgggtgaggcagctctatcgccggataagtgagcccatcaattatttctttaaaaactcagacattttatcaagtccggacggtaaagctgtcatccgtcagtataacaagatctcctatgtgctggtggaattcgaggtggtctatcacacagcctggatcagagagatttcacagttgcattacgctttacaagccacgctttttgtgcgacatccagaaacagggaagttgctggttaatttcgatcccaaaattttggaagttgttcgggaaactaagtgtatgataaaaatgaagttggatgtaccagaacaggcaaagagattgctaaaattggaaagtaaattgaaagcagacaaactgtatttgcagggtcttctgcaatattatgatgagttatgtcaggaagtgccttctgtgtttgtcaatctgatgaccccaaaaatgaaaaaggtggaatctgtgttgaggcaaggactcacagtgttaacatggtcgtctttaacactggaaagcttctttcaagaagtcgaattagttttggatatgttcaatcaacttttaaagaagatcagtgacttgtgtgaaatgcatattgatacagttctgaaggagatagccaaaactgtgttgatttctctgcctgaaagtggtgctaccaaagtagaagatatgttgaccctcaatgagacatacacaaaagaatgggctgacattctaaaccacaaaagtaagcatgtggaagaagctgtcagagaacttatatcaatatttgagcagatttatgaagtgaaatacactgggaaagtaggaaaacagtcagaacagcggaaacacgttgtttttggaagtgaaacaggagagggtgaaaacaatgactatgaagctaatattgtgaatgagtttgatactcatgataaagaagatgaatttaaaaaggagtgtaaagaggtctttgcttttttctctcatcaattactagacagtcttcaaaaagctacacggttatctctggacacaatgaaaagaagaatatttgttgcaagcctttatgggcgaaagcagtcagaagatattatttcctttataaaaagtgaagtacatcttgcaattcctaatgtggtgatgattcctagtttggatgacattcaacaagccattaaccgtatgatccagttaaccctggaggtcagcagaggagtggctcactgggggcaacagcaaatccgtcccatcaagtctgtcattcccagccccaccactactgacgtgacccatcaaaacacaggaaaactgctgaagaaggaagaaagatcttttgaagaagctattcctgcgaggaagctgaagaatttttacccgggggtagcggagcacaaggatatttctaagttggtcctgctcctttcttcctctgtaaattccctaagaaaggcagctcatgaggccctgcaggactttcagaagtacaagactctctggacagaggaccgcgatgtgaaagtgaaggaatttttggctaacaacccctctctgactgaaatcagatcagaaattctacactatgctacttttgaacaggagattgatgagttgaagcctattattgttgtaggagcacttgaattacatacagagccgatgaaattggccttatccatcgaggccaaggcatggaagatgttactctgtcgatatctgaatgaagaatacaaaaagaaaatgtcatacatgatagcatttattaatgaatacttgaaaaagttatctagacctattcgtgatttagatgatgtcagatttgcaatggaagccttgtcttgcatacgtgataatgaaattcaaatggacatgactttgggaccaattgaagaagcctatgctattttaaacagatttgaagttgaagtaaccaaagaagaatcagaagcagttgataccttaagatattctttcaacaaattgcagagcaaagctgtttcagtacaagaggacctagttcaagtgcagccaaagtttaaaagcaatctacttgagtctgtggaagtttttcgtgaggacgtgataaactttgcagaagcatatgaattggaaggacctatggttccaaatataccaccccaagaagctagcaacaggctacagatatttcaggccagtttcgatgatctgtggaggaaatttgttacgtattcatctggtgaacaactttttggattgcctgtgactgattatgaggttttacacaaaaccagaaaagaactcaacttgctgcagaagctgtatggattgtatgacaccgtaatgagcagtattagtggttattatgaaatactttggggagatgtagatattgaaaaaattaatgcagaactgctggaatttcaaaacagatgtcgtaaacttccaaaaggacttaaagattggcaagcttttttggatctcaaaaagagaattgatgatttcagtgagtcatgtcctctactggaaatgatgaccaataaggccatgaaacagagacactgggatagaatctccgagttaactggaaccccatttgatgtggaatctgattctttttgccttagaaatatcatggaagcaccactccttaaacataaggatgatattgaggatatttgcatatctgccattaaggagaaggatatcgaagccaagctgactcaggtgattgagaattggaccaaccaaaatctgagttttgcagcatttaagggaaaaggagagctcctgctcaaaggaaccgaatcgggagaaattatcactttgatggaggatagtttaatggtcttagggtctttactcagcaacagatacaatgctccatttaaaaaaaatatccagaattgggtgtataaattgtccacttcctcagatataattgaagagtggctcgtagtacagaacctttgggtttatcttgaagccgtctttgtaggtggagatattgccaaacagctgcctcaggaagcaaaacgttttcagaatattgacaagtcttggataaaaataatgcagcgagctcatgagaatcccaatgtgattaattgctgtgttggagatgaaaccatgggacaacttttacctcatttacatgagcagttggaagtatgtcagaagtcactcacagggtatttggagaagaaacgattactgtttccaagattcttctttgtatctgatccagttctcctggaaattcttggacaagccagtgattcccacaccatacagccgcatctccctgcagtatctgacaacatcaatgaggtgacatttcatgcaaaagactatgatcgcatcatggccgtcatatcaagagaaggagaaaaaattgttttggataattctgttatggccaaaggtcctgtggagatttggctactggatttgttaaaaatgcagatgtcatcattacataatataattagatccgctttctatcaaatcagtgattcaggatttcaactcttaccattcctcagccactttccagcacaggttggacttctgggaattcagatgttgtggacacacgattcagaagaggctttacgtaatgcaaaagatgacaggaaaatcatgcaagtgaccaatcagaaatttttggatattctaaatactctcattagtcagacaacacatgatctaagcaagtttgatagagtgaagttcgagactctaattaccatccatgtgcatcagagagatatttttgatgacttggtaaaaatgcatatcaaatcacctactgactttgaatggctaaaacagagtagattttattttaaggaagatttggatcaaactgtggtgtctattacagatgttgattttatttaccaaaatgaatttctgggatgtactgatcgtcttgttatcactccattaacagatagatgctatatcacgttagctcaggccttgggcatgaacatgggaggtgctcccgcaggacctgctggcactggcaaaacagaaaccacaaaagacatgggaaggtgtttgggaaaatatgtggtcgtgttcaattgctcagatcaaatggatttcagaggcctaggaaggattttcaaaggtcttgcacagtcgggttcctggggctgttttgatgagtttaacagaattgaattgcctgtattatcagtggcagcacaacaaatttatattgttttgacagcaagaaaagaaagaaagaaacagttcattttttctgatggtgattgtgttgatttaaatccagaatttggaatcttcttaacgatgaaccctggatatgctgggcgccaggaactaccagaaaacctaaaaatccagtttagaactgttgctatgatggttcctgatagacagatcattatgagagttaaacttgcaagctgtggttttcttgaaaatgttatcttggctcaaaaattttacgttctttacaaactctgtgaagagcaacttactaaacaggttcattatgactttggattgagaaatattctgtctgtattgaggactcttggatctcaaaaaagagccagaccagaagatagtgaattaagcattgtcatgagaggactaagagatatgaacctttccaaactggttgatgaagatgaacccctgttcctcagcttaatcaatgacctgttcccaggactgcaactggatagtaatacttatgcagaactgcaaaacgcagtagcccatcaggttcagatagagggtttgattaaccatccaccctggaacctgaaactcgtgcagttatatgagacgtctttggtacggcatggcttgatgactcttgggcccagtggttctggaaagacaaccgttatcacgattctaatgaaggcgcaaacagaatgcggaaggcctcatagagaaatgcgaatgaatccaaaagccattactgcacctcagatgtttggcagactggacactgctaccaatgactggacagatgggattttttctactctgtggagaaaaacattaaaagctaaaaaaggtgaaaacattttcctcattttagatggtcctgtggatgccatctggattgagaacttaaattccgttttggatgacaataaaactctgacgttagctaatggagatcgcattcccatggcccctagttgtaagcttctgtttgaagtccacaatatcgagaacgcctctcctgccacggtttctaggatgggcatggtctatatcagcagctctgctctcagctggaggccaatcttacaggcatggttgaagaaacgcactgcacaggaagctgctgtattcctgacactgtatgagaaagtctttgaagatacatacacatatatgaagctaaatctcaatcccaaaatgcagctcttggagtgcaactatattgtgcaatctctcaatcttctggaagggttaattccctccaaagaagaaggcggtgtttcctgtgtcgaacatcttcataaattatttgtgtttggcctaatgtggagtttaggagcccttctggaattagaaagcagagaaaagcttgaagccttcttacggcagcatgaaagcaagttggacttaccagaaatacctaaaggctcaaatcaaaccatgtatgagttttatgttactgattatggtgattgggagcactggaataagaaacttcagccttattattatccaactgacagtattccggaatattcatcaattttggttccaaatgttgacaatattagaacaaattttttgatagacaccattgcaaaacaacataaagctgttttgctcacaggagagcagggaactgcaaaaactgtcatggttaaggcctatttgaaaaaatatgatcctgaagtacagctatccaaaagtctaaacttttcatctgccacagaaccaatgatgtttcagagaacaattgaaagctacgtggataagcgaattggaagcacatatgggccaccaggagggagaaaaatgactgtatttattgatgatattaatatgcctgtgattaatgagtggggagatcagataactaatgagattgtgcgacagatgatggaaatggaaggaatgtacagcttggacaagcctggagacttcactactattgttgatgtgcagctcatagcagcaatgatccaccctggaggtggtcgaaatgatattccacaacgtttaaaaagacaatttactgtgtttaattgtacattgccttcaaatgcttcaatagacaaaatttttggaattattggatgtggatactttgatccttgtagaagtttcaagcctcaaatatgtgagatgattgtgaatttagtctcagtgggtagagtgctgtggcaatggactaaggtgaagatgctgccaactccttctaaatttcattacatcttcaatcttcgagatctttccagaatttggcaaggaatgttgaccataaaagctgaggagtgcgcttcaatccctactctcctgtcccttttcaaacacgagtgcagcagagtaattgcagacagatttataactcctgaagatgagcagtggtttaatgcacatcttactcgtgcagttgaagaaaatattggctctgatgcagcgtcgtgtattcttcctgaaccatactttgtggattttcttcgtgagatgccagaaccaactggtgatgaacctgaagactctgtgtttgaagtacccaaaatatatgaattgatgccatcctttgactttctggctgaaaaactccagttttaccagagacagttcaatgaaatcattagaggaacatctcttgatctggtgttttttaaagatgcaatgactcatcttattaagatttcacgaataattcgaacgtcgtgtggaaatgcattgctggtgggtgttggtggttccggaaaacaaagtctttcaagattggcctcttttattgctggctatcaaatattccagataacattaaccaggtcttacaatgtgactaatctaacagatgatttaaaagctttgtacaaagttgctggtgctgatggaaaaggcatcactttcatctttactgacagtgaaataaaagatgaggcatttctagaataccttaacaacttgctatcttcaggggagatctccaacttgtttgcacgagatgagatggatgaaatcacccaaggtctgatttcagtgatgaagagggagctacctcgccatcctcctacctttgataatttgtatgaatacttcatttcaagatcaaggaagaacttacatgttgttctctgcttttctccagttggtgagaagttccgtgcccgttctttgaaatttcctggcttgatatcaggttgcactatggactggttcagccgctggccaagggaggctctgattgctgtggcctcctacttcctttcagactataatattgtctgctctagtgaaattaaaagacaagttgtagaaacaatgggcctgtttcatgacatggtttcagagagctgtgaaagttatttccaaagataccgccgaagagcacatgtgactcccaaatcttacctctcatttataaatggttataaaaacatttatgctgaaaaggtgaagttcattaatgaacaggctgaacgtatgaatattggtcttgataaactaatggaggcaagtgaatctgttgctaaactctctcaggatcttgcagtcaaggagaaggagttggcagtggcttccataaaagcagacgaagtattagcagaagtcacagtaagcgctcaggcttcagccaaaattaaaaatgaagtacaggaggtaaaggacaaagcccaaaaaattgtggatgaaattgatagtgaaaaagtgaaagctgaaagcaagcttgaggcagctaaacctgcactggaagaagcagaagcagccctgaatactatcaagccaaatgatattgccacagtcaggaaacttgcaaaaccaccacatcttattatgagaatcatggactgtgttctgttactatttcaaaagaaaattgaccctgttactatggatccagaaaaatcttgctgtaagccatcatggggagagtcattaaagttgatgagtgcaacaggattcctgtggagccttcagcagttccctaaggacactataaatgaagagactgttgagttactacagccatattttaatatggatgattatacttttgaaagtgccaaaaaagtctgtgggaatgtggctggtctcctgtcttggacacttgctatggcaatattttatggcatcaatagagaagtgttgcctctgaaggccaacctggccaagcaggaaggccggttagcagttgctaatgctgagttagggaaggcacaagccctgctggatgagaagcaagctgagctggataaagtacaggcaaaatttgatgcagcaatgaatgagaaaatggatttgcttaatgacgctgatacgtgccggaaaaagatgcaggccgcctccactctcatcgatgggctgagtggagaaaaaatccggtggacccagcaaagtaaagaattcaaagctcagattaatagacttgtaggtgatattctgctgtgcacgggattcctttcctaccttggtcctttcaatcagatatttaggaactatttgcttaaagatcaatgggaaatggagttgagagcacggaaaattcctttcacagaaaacctgaatcttatttcaatgttggtggatcctccaactattggtgagtgggggctacagggattaccaggagatgatctctcaattcagaatggcattattgtgacaaaggccaccagatacccactcctcatagacccacaaactcaaggcaaaacttggattaaatcaaaggaaaaagaaaatgatttacaggtgacatctctgaaccataaatattttcgcacacacttggaggacagcctttccttgggccgaccccttctcattgaggacattcatgaagagctggatccagccttggataatgtattagaaaagaattttattaaatctggcaccactttcaaggtgaaagtcggtgataaggaatgtgatatcatggatacatttaaactttacattactacgaagttaccaaatcctgcctttaccccagagattaatgctaaaacgtcagtcattgatttcactgttacaatgaaaggacttgagaatcagttactaaggagagtcattctaacagagaaacaggagttagaggctgagagggttaaacttttggaggatgttacttttaataagcggaagatgaaagaacttgaagataacctcctctataaattaagtgctacaaaaggctcattggtagatgacgaatctctcattggtgtacttcgaactaccaagcagacagcagctgaggtaagtgaaaagttgcatgtggctgcagaaactgagatcaagatcaacgcggctcaggaggagttccggcccgcagccacccgcggaagcatcctctacttcctcatcacagagatgagcatggtcaacatcatgtatcagacgtcattggcccagttcttgaagttatttgaccagtccatggccagatctgaaaagtcaccactacctcaaaagagaattacaaatattatcgagtacctgacatatgaagtttttacatactctgtcagaggcctatacgaaaaccacaaattcctgtttgtactcctcatgaccttaaagattgaccttcagagagggacagttaagcacagagagtttcaagctctcattaaagggggagcagctctggacctgaaagcctgtcctcccaaaccctatcgctggatccttgacatgacttggctgaatcttgtggagctgagtaaacttccacaatttgcagaaattatgaaccagatatctcgtaatgagaaggggtggaaaagctggtttgataaagatgctccagaggaggaaattatccctgatggatataatgattcactagatacctgccataaacttttacttatcaggtcttggtgcccagaccgtactgtttttcaagcaagaaagtatattgcagattctttggaggagaagtacacagaaccagttatcttaaatctggagaaaacttgggaagaaagtgatacccggacacctctgatatgcttcctgtccatgggatctgaccccaccaatcaaattgatgcattggccaagaaactgaaactggaatgtagaactatctcaatggggcaaggacaagaagtacatgctcgaaagctgattcagatgtcaatgcagcagggtggttgggtattactacaaaattgccaccttggcctggaattcatggaagaattactagagacgctaattaccactgaagccagtgatgattctttccgagtatggataactacggagccccatgatcgatttccaattacattgcttcagacctctctcaaattcactaatgagccaccccaaggtgtacgcgcaggtttgaaaagaacatttgctggaattaatcaagaccttctggacatcagtaatttacccatgtggaagccgatgctttacacagtagcatttttacactccactgtgcaggagcgacgaaaatttggccccttaggatggaatattccctacgaattcaattctgctgacttttcagccagtgttcagtttattcagaatcaccttgatgaatgcgatattaagaaaggtgtatcatggaatacggttcggtacatgatcggagaagtacaatatggaggcagagtgacagatgactttgacaaacgtctacttaattgctttgccagagtctggttcagtgagaagatgtttgaaccgtcattctgcttttatactggatataaaatccccttatgcaaaaccttagaccagtattttgaatacatccagtcactgccatccctagataaccctgaagtctttgggcttcaccctaatgctgatatcacgtatcagagtaacactgcttctgctgttcttgaaacaattaccaacattcaacccaaagagagtggaggtggtgtgggagagacccgggaggctattgtttatagattatctgaagatatgctgagtaaactccctcctgattacattcctcatgaggtgaaatctcgtttgataaagatgggccatcttaattcaatgaacatatttcttagacaagaaattgacagaatgcaaagagtcatttcaatactccgcagtagcctgagtgatctaaaattggccattgaaggaacaatcattatgagtgagaatctgagagatgctctggacaacatgtatgatgctcgtatacctcagctctggaaaagagtgtcttgggattcgtccacactgggcttctggttcactgaacttttggaaagaaatgctcagttttctacgtggatatttgaagggaggcctaatgtgttttggatgactggtttctttaatccccaaggcttcctcacagcaatgaggcaagaagtgacccgtgcccacaaaggctgggcactggacactgtgaccatccacaatgaagttctgagacagaccaaggaggagatcacgtcaccccctggggaaggtgtgtatatttatgggctctacatggatggagcagcctgggacagacggaatgggaagctcatggaatccacccccaaggtactcttcacgcagttacccgtgctccacatctttgccattaactccacggcacccaaggaccccaagctgtatgtgtgtcctatttacaagaaacccaggcgaactgatttgaccttcatcactgtggtatatttacgaacagtgttgtccccggatcactggatcctgagaggagtggcccttttgtgtgacatcaagtaagttcatttccatctgctcagggcaccagaacccacatagacagcctgtgctattgagggactcagtgatgtgtgtgtcttttctccccagtaattccttaattactctttctacattaaaaagttgatgttctaaaattgctagtgcgtgtgtgttttcctcacatatcaatattcaaaaagataactctaaatgaatgttttttattctgggaaatcatatttcactataattactttttaaagataaaaccctgtttggatgttagaacactttggaagctctgaattttaaaaatttgaaagtgttgatatgtgacatcctaaaaagagcctagtagttgtaaacttttccctcaagtaggtaccaatttcccttgaataaaatctagccatgtctatgtctg

SEQ ID NO: 128 - DNA, 14554 bp, Homo sapiens
  source 1..14554: mol_type = genomic DNA
cccggggcagcgcaaccgctggggccggcctcagtgggctgagtggtcggggcatcggggcccagagagcggctggtttcgaagtataaagcattccgcacgacgggggatggagaaggatgctgaagatggcgccccttctgagggagcagaggctcctccctctacggaagaggctgcccctccccgttcagaagaggaagaggccccgcgccctccgacagtggaggccccggcagaagatggtttctctccttccgcagaagatgctgtttcttctgtggtggattatcgggatctcattccttctgaagaagggatagttcttccagatgatcatgaagcggatctgaatagagttcgacagaggcttgcaccgcgaccggttcagtcagtgatttcggaagtgctgtccttgccgtcttcccggaggtcctccagataccgccggagtatgagtggccttcccaatctacaggaaacattaaaagagagacaggcaagatttagagaggcaagggaaagccgaagactgaaaattgacccttcatacaaatatatatttgaaattctagcagaaaatcttggcctggacatagtaactgttgaagaattaattttggattgcccatctaatgtggtcgaactattgctggagcaactaaaggggcaaaaatgatgaaattgtatatagacaatgcagccccggataaactaaaaggactgtgcatattttttgttcgttgccgtaatgatgttgctataaatgttaaaactattcaagaggaagcgctctttactgttctggatgcgtcgaaaggactcttaaatggaattagggatatgttggcaaatatatttctaccagctgttcttgcaacaaacaactggggtgctttaaaccagtccaagcagggagaatctgaaaaacatattttcactgaaaccatcaacagatatctttcatttttagatggtgctagaataagtattgagggaacagtgaagttaaagacaatagacaatgttaatttttccaaactgcacacctttgaagaagtaactgctgcagccagcaactcagaaactgttcatcagctggaggaagtgctgatggtatggtacaaacagatcgaacaggtacttattgagagtgagcagatgagaaaagaagctggtgattcaggtccactcactgaattggaacactggaaacgcatgtcagccaagttcaactatatcattgagcagattaaagggccaagttgtaaggctgtcataaatgtgctaaatgttgcacactccaaactgctaaagaattggcgtgatttggatgcaagaatcactgatacagcaaatgaatccaaagataatgtcagatatttgtatactttggaaaaagtgtgtcaacctctctataaccatgacctagtttccatggcacatggaatacaaaatttgattaatgccatcagaatgattcacggtgtgtcaaggtattataatacctcagagagaatgacctcattgtttatcaaggtaacaaatcaaatggtaacagcatgtaaagcatatattactgatggaggattaaaccatgtatgggatcaggaaacgccagttgtactaaagaaaattcaggactgcatttttctattcaaggaatatcaggcatcttttcataaaacaaggaaactgatttcagaatcctcaggggaaaaatcttttgaggtttcagaaatgtatatatttggaaaatttgaagctttttgcaaaagactggagaagattacagaaatgataactgttgtgcaaacatattcaaccttgagtaattctaccatagaaggaatagatattatggcaataaaattcagaaatatataccaaggggttaagaaaaagcaatatgacattctggatccaagaaggacagaatttgacacagatttcttagatttcatgacaaaaatcaatggtttagaggtacaaatacaggcatttatgaacagtagttttgggaaaatcttatcttctcagcaggctcttcagctacttcaaaggtttcagaagctgaacattccctgtctgggattagaaataaaccacacaatagagcgtattcttcagtactatgtggctgaacttgatgctactaagaagctttatcattctcagaaagatgacccccctcttgctcgcaacatgccccctatagcaggaaaaatactctgggtgaggcagctctatcgccggataagtgagcccatcaattatttctttaaaaactcagacattttatcaagtccggacggtaaagctgtcatccgtcagtataacaagatctcctatgtgctggtggaattcgaggtggtctatcacacagcctggatcagagagatttcacagttgcattacgctttacaagccacgctttttgtgcgacatccagaaacagggaagttgctggttaatttcgatcccaaaattttggaagttgttcgggaaactaagtgtatgataaaaatgaagttggatgtaccagaacaggcaaagagattgctaaaattggaaagtaaattgaaagcagacaaactgtatttgcagggtcttctgcaatattatgatgagttatgtcaggaagtgccttctgtgtttgtcaatctgatgaccccaaaaatgaaaaaggtggaatctgtgttgaggcaaggactcacagtgttaacatggtcgtctttaacactggaaagcttctttcaagaagtcgaattagttttggatatgttcaatcaacttttaaagaagatcagtgacttgtgtgaaatgcatattgatacagttctgaaggagatagccaaaactgtgttgatttctctgcctgaaagtggtgctaccaaagtagaagatatgttgaccctcaatgagacatacacaaaagaatgggctgacattctaaaccacaaaagtaagcatgtggaagaagctgtcagagaacttatatcaatatttgagcagatttatgaagtgaaatacactgggaaagtaggaaaacagtcagaacagcggaaacacgttgtttttggaagtgaaacaggagagggtgaaaacaatgactatgaagctaatattgtgaatgagtttgatactcatgataaagaagatgaatttaaaaaggagtgtaaagaggtctttgcttttttctctcatcaattactagacagtcttcaaaaagctacacggttatctctggacacaatgaaaagaagaatatttgttgcaagcctttatgggcgaaagcagtcagaagatattatttcctttataaaaagtgaagtacatcttgcaattcctaatgtggtgatgattcctagtttggatgacattcaacaagccattaaccgtatgatccagttaaccctggaggtcagcagaggagtggctcactgggggcaacagcaaatccgtcccatcaagtctgtcattcccagccccaccactactgacgtgacccatcaaaacacaggaaaactgctgaagaaggaagaaagatcttttgaagaagctattcctgcgaggaagctgaagaatttttacccgggggtagcggagcacaaggatatttctaagttggtcctgctcctttcttcctctgtaaattccctaagaaaggcagctcatgaggccctgcaggactttcagaagtacaagactctctggacagaggaccgcgatgtgaaagtgaaggaatttttggctaacaacccctctctgactgaaatcagatcagaaattctacactatgctacttttgaacaggagattgatgagttgaagcctattattgttgtaggagcacttgaattacatacagagccgatgaaattggccttatccatcgaggccaaggcatggaagatgttactctgtcgatatctgaatgaagaatacaaaaagaaaatgtcatacatgatagcatttattaatgaatacttgaaaaagttatctagacctattcgtgatttagatgatgtcagatttgcaatggaagccttgtcttgcatacgtgataatgaaattcaaatggacatgactttgggaccaattgaagaagcctatgctattttaaacagatttgaagttgaagtaaccaaagaagaatcagaagcagttgataccttaagatattctttcaacaaattgcagagcaaagctgtttcagtacaagaggacctagttcaagtgcagccaaagtttaaaagcaatctacttgagtctgtggaagtttttcgtgaggacgtgataaactttgcagaagcatatgaattggaaggacctatggttccaaatataccaccccaagaagctagcaacaggctacagatatttcaggccagtttcgatgatctgtggaggaaatttgttacgtattcatctggtgaacaactttttggattgcctgtgactgattatgaggttttacacaaaaccagaaaagaactcaacttgctgcagaagctgtatggattgtatgacaccgtaatgagcagtattagtggttattatgaaatactttggggagatgtagatattgaaaaaattaatgcagaactgctggaatttcaaaacagatgtcgtaaacttccaaaaggacttaaagattggcaagcttttttggatctcaaaaagagaattgatgatttcagtgagtcatgtcctctactggaaatgatgaccaataaggccatgaaacagagacactgggatagaatctccgagttaactggaaccccatttgatgtggaatctgattctttttgccttagaaatatcatggaagcaccactccttaaacataaggatgatattgaggatatttgcatatctgccattaaggagaaggatatcgaagccaagctgactcaggtgattgagaattggaccaaccaaaatctgagttttgcagcatttaagggaaaaggagagctcctgctcaaaggaaccgaatcgggagaaattatcactttgatggaggatagtttaatggtcttagggtctttactcagcaacagatacaatgctccatttaaaaaaaatatccagaattgggtgtataaattgtccacttcctcagatataattgaagagtggctcgtagtacagaacctttgggtttatcttgaagccgtctttgtaggtggagatattgccaaacagctgcctcaggaagcaaaacgttttcagaatattgacaagtcttggataaaaataatgcagcgagctcatgagaatcccaatgtgattaattgctgtgttggagatgaaaccatgggacaacttttacctcatttacatgagcagttggaagtatgtcagaagtcactcacagggtatttggagaagaaacgattactgtttccaagattcttctttgtatctgatccagttctcctggaaattcttggacaagccagtgattcccacaccatacagccgcatctccctgcagtatctgacaacatcaatgaggtgacatttcatgcaaaagactatgatcgcatcatggccgtcatatcaagagaaggagaaaaaattgttttggataattctgttatggccaaaggtcctgtggagatttggctactggatttgttaaaaatgcagatgtcatcattacataatataattagatccgctttctatcaaatcagtgattcaggatttcaactcttaccattcctcagccactttccagcacaggttggacttctgggaattcagatgttgtggacacacgattcagaagaggctttacgtaatgcaaaagatgacaggaaaatcatgcaagtgaccaatcagaaatttttggatattctaaatactctcattagtcagacaacacatgatctaagcaagtttgatagagtgaagttcgagactctaattaccatccatgtgcatcagagagatatttttgatgacttggtaaaaatgcatatcaaatcacctactgactttgaatggctaaaacagagtagattttattttaaggaagatttggatcaaactgtggtgtctattacagatgttgattttatttaccaaaatgaatttctgggatgtactgatcgtcttgttatcactccattaacagatagatgctatatcacgttagctcaggccttgggcatgaacatgggaggtgctcccgcaggacctgctggcactggcaaaacagaaaccacaaaagacatgggaaggtgtttgggaaaatatgtggtcgtgttcaattgctcagatcaaatggatttcagaggcctaggaaggattttcaaaggtcttgcacagtcgggttcctggggctgttttgatgagtttaacagaattgaattgcctgtattatcagtggcagcacaacaaatttatattgttttgacagcaagaaaagaaagaaagaaacagttcattttttctgatggtgattgtgttgatttaaatccagaatttggaatcttcttaacgatgaaccctggatatgctgggcgccaggaactaccagaaaacctaaaaatccagtttagaactgttgctatgatggttcctgatagacagatcattatgagagttaaacttgcaagctgtggttttcttgaaaatgttatcttggctcaaaaattttacgttctttacaaactctgtgaagagcaacttactaaacaggttcattatgactttggattgagaaatattctgtctgtattgaggactcttggatctcaaaaaagagccagaccagaagatagtgaattaagcattgtcatgagaggactaagagatatgaacctttccaaactggttgatgaagatgaacccctgttcctcagcttaatcaatgacctgttcccaggactgcaactggatagtaatacttatgcagaactgcaaaacgcagtagcccatcaggttcagatagagggtttgattaaccatccaccctggaacctgaaactcgtgcagttatatgagacgtctttggtacggcatggcttgatgactcttgggcccagtggttctggaaagacaaccgttatcacgattctaatgaaggcgcaaacagaatgcggaaggcctcatagagaaatgcgaatgaatccaaaagccattactgcacctcagatgtttggcagactggacactgctaccaatgactggacagatgggattttttctactctgtggagaaaaacattaaaagctaaaaaaggtgaaaacattttcctcattttagatggtcctgtggatgccatctggattgagaacttaaattccgttttggatgacaataaaactctgacgttagctaatggagatcgcattcccatggcccctagttgtaagcttctgtttgaagtccacaatatcgagaacgcctctcctgccacggtttctaggatgggcatggtctatatcagcagctctgctctcagctggaggccaatcttacaggcatggttgaagaaacgcactgcacaggaagctgctgtattcctgacactgtatgagaaagtctttgaagatacatacacatatatgaagctaaatctcaatcccaaaatgcagctcttggagtgcaactatattgtgcaatctctcaatcttctggaagggttaattccctccaaagaagaaggcggtgtttcctgtgtcgaacatcttcataaattatttgtgtttggcctaatgtggagtttaggagcccttctggaattagaaagcagagaaaagcttgaagccttcttacggcagcatgaaagcaagttggacttaccagaaatacctaaaggctcaaatcaaaccatgtatgagttttatgttactgattatggtgattgggagcactggaataagaaacttcagccttattattatccaactgacagtattccggaatattcatcaattttggttccaaatgttgacaatattagaacaaattttttgatagacaccattgcaaaacaacataaagctgttttgctcacaggagagcagggaactgcaaaaactgtcatggttaaggcctatttgaaaaaatatgatcctgaagtacagctatccaaaagtctaaacttttcatctgccacagaaccaatgatgtttcagagaacaattgaaagctacgtggataagcgaattggaagcacatatgggccaccaggagggagaaaaatgactgtatttattgatgatattaatatgcctgtgattaatgagtggggagatcagataactaatgagattgtgcgacagatgatggaaatggaaggaatgtacagcttggacaagcctggagacttcactactattgttgatgtgcagctcatagcagcaatgatccaccctggaggtggtcgaaatgatattccacaacgtttaaaaagacaatttactgtgtttaattgtacattgccttcaaatgcttcaatagacaaaatttttggaattattggatgtggatactttgatccttgtagaagtttcaagcctcaaatatgtgagatgattgtgaatttagtctcagtgggtagagtgctgtggcaatggactaaggtgaagatgctgccaactccttctaaatttcattacatcttcaatcttcgagatctttccagaatttggcaaggaatgttgaccataaaagctgaggagtgcgcttcaatccctactctcctgtcccttttcaaacacgagtgcagcagagtaattgcagacagatttataactcctgaagatgagcagtggtttaatgcacatcttactcgtgcagttgaagaaaatattggctctgatgcagcgtcgtgtattcttcctgaaccatactttgtggattttcttcgtgagatgccagaaccaactggtgatgaacctgaagactctgtgtttgaagtacccaaaatatatgaattgatgccatcctttgactttctggctgaaaaactccagttttaccagagacagttcaatgaaatcattagaggaacatctcttgatctggtgttttttaaagatgcaatgactcatcttattaagatttcacgaataattcgaacgtcgtgtggaaatgcattgctggtgggtgttggtggttccggaaaacaaagtctttcaagattggcctcttttattgctggctatcaaatattccagataacattaaccaggtcttacaatgtgactaatctaacagatgatttaaaagctttgtacaaagttgctggtgctgatggaaaaggcatcactttcatctttactgacagtgaaataaaagatgaggcatttctagaataccttaacaacttgctatcttcaggggagatctccaacttgtttgcacgagatgagatggatgaaatcacccaaggtctgatttcagtgatgaagagggagctacctcgccatcctcctacctttgataatttgtatgaatacttcatttcaagatcaaggaagaacttacatgttgttctctgcttttctccagttggtgagaagttccgtgcccgttctttgaaatttcctggcttgatatcaggttgcactatggactggttcagccgctggccaagggaggctctgattgctgtggcctcctacttcctttcagactataatattgtctgctctagtgaaattaaaagacaagttgtagaaacaatgggcctgtttcatgacatggtttcagagagctgtgaaagttatttccaaagataccgccgaagagcacatgtgactcccaaatcttacctctcatttataaatggttataaaaacatttatgctgaaaaggtgaagttcattaatgaacaggctgaacgtatgaatattggtcttgataaactaatggaggcaagtgaatctgttgctaaactctctcaggatcttgcagtcaaggagaaggagttggcagtggcttccataaaagcagacgaagtattagcagaagtcacagtaagcgctcaggcttcagccaaaattaaaaatgaagtacaggaggtaaaggacaaagcccaaaaaattgtggatgaaattgatagtgaaaaagtgaaagctgaaagcaagcttgaggcagctaaacctgcactggaagaagcagaagcagccctgaatactatcaagccaaatgatattgccacagtcaggaaacttgcaaaaccaccacatcttattatgagaatcatggactgtgttctgttactatttcaaaagaaaattgaccctgttactatggatccagaaaaatcttgctgtaagccatcatggggagagtcattaaagttgatgagtgcaacaggattcctgtggagccttcagcagttccctaaggacactataaatgaagagactgttgagttactacagccatattttaatatggatgattatacttttgaaagtgccaaaaaagtctgtgggaatgtggctggtctcctgtcttggacacttgctatggcaatattttatggcatcaatagagaagtgttgcctctgaaggccaacctggccaagcaggaaggccggttagcagttgctaatgctgagttagggaaggcacaagccctgctggatgagaagcaagctgagctggataaagtacaggcaaaatttgatgcagcaatgaatgagaaaatggatttgcttaatgacgctgatacgtgccggaaaaagatgcaggccgcctccactctcatcgatgggctgagtggagaaaaaatccggtggacccagcaaagtaaagaattcaaagctcagattaatagacttgtaggtgatattctgctgtgcacgggattcctttcctaccttggtcctttcaatcagatatttaggaactatttgcttaaagatcaatgggaaatggagttgagagcacggaaaattcctttcacagaaaacctgaatcttatttcaatgttggtggatcctccaactattggtgagtgggggctacagggattaccaggagatgatctctcaattcagaatggcattattgtgacaaaggccaccagatacccactcctcatagacccacaaactcaaggcaaaacttggattaaatcaaaggaaaaagaaaatgatttacaggtgacatctctgaaccataaatattttcgcacacacttggaggacagcctttccttgggccgaccccttctcattgaggacattcatgaagagctggatccagccttggataatgtattagaaaagaattttattaaatctggcaccactttcaaggtgaaagtcggtgataaggaatgtgatatcatggatacatttaaactttacattactacgaagttaccaaatcctgcctttaccccagagattaatgctaaaacgtcagtcattgatttcactgttacaatgaaaggacttgagaatcagttactaaggagagtcattctaacagagaaacaggagttagaggctgagagggttaaacttttggaggatgttacttttaataagcggaagatgaaagaacttgaagataacctcctctataaattaagtgctacaaaaggctcattggtagatgacgaatctctcattggtgtacttcgaactaccaagcagacagcagctgaggtaagtgaaaagttgcatgtggctgcagaaactgagatcaagatcaacgcggctcaggaggagttccggcccgcagccacccgcggaagcatcctctacttcctcatcacagagatgagcatggtcaacatcatgtatcagacgtcattggcccagttcttgaagttatttgaccagtccatggccagatctgaaaagtcaccactacctcaaaagagaattacaaatattatcgagtacctgacatatgaagtttttacatactctgtcagaggcctatacgaaaaccacaaattcctgtttgtactcctcatgaccttaaagattgaccttcagagagggacagttaagcacagagagtttcaagctctcattaaagggggagcagctctggacctgaaagcctgtcctcccaaaccctatcgctggatccttgacatgacttggctgaatcttgtggagctgagtaaacttccacaatttgcagaaattatgaaccagatatctcgtaatgagaaggggtggaaaagctggtttgataaagatgctccagaggaggaaattatccctgatggatataatgattcactagatacctgccataaacttttacttatcaggtcttggtgcccagaccgtactgtttttcaagcaagaaagtatattgcagattctttggaggagaagtacacagaaccagttatcttaaatctggagaaaacttgggaagaaagtgatacccggacacctctgatatgcttcctgtccatgggatctgaccccaccaatcaaattgatgcattggccaagaaactgaaactggaatgtagaactatctcaatggggcaaggacaagaagtacatgctcgaaagctgattcagatgtcaatgcagcagggtggttgggtattactacaaaattgccaccttggcctggaattcatggaagaattactagagacgctaattaccactgaagccagtgatgattctttccgagtatggataactacggagccccatgatcgatttccaattacattgcttcagacctctctcaaattcactaatgagccaccccaaggtgtacgcgcaggtttgaaaagaacatttgctggaattaatcaagaccttctggacatcagtaatttacccatgtggaagccgatgctttacacagtagcatttttacactccactgtgcaggagcgacgaaaatttggccccttaggatggaatattccctacgaattcaattctgctgacttttcagccagtgttcagtttattcagaatcaccttgatgaatgcgatattaagaaaggtgtatcatggaatacggttcggtacatgatcggagaagtacaatatggaggcagagtgacagatgactttgacaaacgtctacttaattgctttgccagagtctggttcagtgagaagatgtttgaaccgtcattctgcttttatactggatataaaatccccttatgcaaaaccttagaccagtattttgaatacatccagtcactgccatccctagataaccctgaagtctttgggcttcaccctaatgctgatatcacgtatcagagtaacactgcttctgctgttcttgaaacaattaccaacattcaacccaaagagagtggaggtggtgtgggagagacccgggaggctattgtttatagattatctgaagatatgctgagtaaactccctcctgattacattcctcatgaggtgaaatctcgtttgataaagatgggccatcttaattcaatgaacatatttcttagacaagaaattgacagaatgcaaagagtcatttcaatactccgcagtagcctgagtgatctaaaattggccattgaaggaacaatcattatgagtgagaatctgagagatgctctggacaacatgtatgatgctcgtatacctcagctctggaaaagagtgtcttgggattcgtccacactgggcttctggttcactgaacttttggaaagaaatgctcagttttctacgtggatatttgaagggaggcctaatgtgttttggatgactggtttctttaatccccaaggcttcctcacagcaatgaggcaagaagtgacccgtgcccacaaaggctgggcactggacactgtgaccatccacaatgaagttctgagacagaccaaggaggagatcacgtcaccccctggggaaggtgtgtatatttatgggctctacatggatggagcagcctgggacagacggaatgggaagctcatggaatccacccccaaggtactcttcacgcagttacccgtgctccacatctttgccattaactccacggcacccaaggaccccaagctgtatgtgtgtcctatttacaagaaacccaggcgaactgatttgaccttcatcactgtggtatatttacgaacagtgttgtccccggatcactggatcctgagaggagtggcccttttgtgtgacatcaagtaagttcatttccatctgctcagggcaccagaacccacatagacagcctgtgctattgagggactcagtgatgtgtgtgtcttttctccccagtaattccttaattactctttctacattaaaaagttgatgttctaaaattgctagtgcgtgtgtgttttcctcacatatcaatattcaaaaagataactctaaatgaatgttttttattctgggaaatcatatttcactataattactttttaaagataaaaccctgtttggatgttagaacactttggaagctctgaattttaaaaatttgaaagtgttgatatgtgacatcctaaaaagagcctagtagttgtaaacttttccctcaagtaggtaccaatttcccttgaataaaatctagccatgtctatgtctg

SEQ ID NO: 129 - DNA, 1219 bp, Homo sapiens
  source 1..1219: mol_type = genomic DNA
tgataatctaaggaaattcaccgaaaacctccagtagccacctgctctttgccctgacagttctcaaggaagtggtcctcctgctgccccaagcctgtcagcctccatgaaaccaagccttccacactataatacagaaaagtaaagtctttgctttccgggctaccttgtagcaatttgaggctctgtcatcagtttctgctacgtttcaaagatccaggagaagcttagtgttgtgtcaagacgccgatggacccatcacagtttaatccaacctacatcccagggtctccacaaatgctcaccgaagaaaattcccgggacgattcaggggcctctcaaatctcctccgagacgttgataaagaaccttagtaacttgactatcaacgctagtagcgaatctgtttcccctctattggaagctttactccgtcgagagtctgtgggggcagcagtcctcagggaaatcgaagatgagtggctttacagcaggagaggagtaagaacactgctgtctgtgcagagagaaaagatggcaagattgagatacatgttactgggcggagttcgtacgcatgaaagaagaccaacaaacaaggagcctaagggagttaagaaggaatcaagaccattcaaatgtccctgcagtttctgcgtgtctaatggatgggatccttctgagaatgctagaatagagaatcaagacaccaagccacttcagccataaatcttattcttgcacctttttttcttgctagtaattttatatagcaggttgagaaagctactctatgctagtatagactatacaccaataattttgataatgagttctaggatgtatttttcttgtatctttttcttcctactttgatactagtaattcataagggatctgtgtaatctgaatgtatttgaataactttagctctactgtttgatttgacccaaagaagccaagacgatataagtattcccatgtgtcttagaagcccaaagtcagtgagatgaaacccaacatcaagaaattgaagcaaagttacttgtggataaagaaagcattaggtagtttggctatagcataattagattttctggctttcaaaaatttggattgcaatcacagcaaactttgttatttttacagttttcagtacaaaagtgtttatatagaaacaataaagttgacatttgagtacctttaaaaaaaaaaaaaa

SEQ ID NO: 130 - DNA, 722 bp, Homo sapiens
  source 1..722: mol_type = genomic DNA
ctgccatggaccccgcgcccggcgtcctagatccccgcgccgcgccgcccgcgctcctgggcaccccgcaagccgaggtgctggaggacgtgttgcgggagcagttcgggccgctgccccagctggccgctgtctgccggctcaagcggctgccctcgggcggctactcgtccactgaaaacctccagttggtgctggagcggcggcgtgtggccaacgccaaggagcgtgagcggataaaaaatctcaaccgtggttttgccagattgaaggcacttgtgccatttcttccccaaagcaggaagcccagcaaagttgatatccttaaaggtgcgactgaatatatacaggttctcagtgatcttttggaaggagccaaagactcaaagaaacaagacccagatgagcagagctatagtaacaacagttctgaatcacatacatcctcggcaagacagctgtcaagaaacatcacccaacatatcagctgtgctttcggcttgaagaatgaagaggaagggccttgggcagatggtggcagtggtgagccagcacacgcttgtcgccacagtgtgatgtctacgactgaaattatctccccaaccagaagtctggatagattcccagaagtagaactgctgagtcacagacttccacaagtatgaaaaatgaaaaggcccagggttaccttctagagacaaataaatgcagtcttgaaagtt

SEQ ID NO: 131 - DNA, 759 bp, Mus musculus
  source 1..759: mol_type = genomic DNA
gcttggaacacctgaggcgcccaggtgcctctgctgcccgtggtcttgaccaccatggatacagcacctgcatccccagagcccttcctggtcactccgcaggctgaggtgctggaggagctgattcaggcccagatggggcccctgccccggctcgccgccatctgtaggctcaagcgcctgccctcaggcggctactccaccacggatgacctgcatctggtgttggagcgcaggcgtgtggccaacgccaaagagcgtgaacggataaaaaatctcaaccgtggctttgccaagctgaaggctctggtgccgtttctaccacagagcaggaagcccagtaaagttgatatccttaaaggtgccacagaatacatacagatactcggctgtgttctggaagaagcgaaggtctcagagaaacaaagccctgaggagcagacccacagtggcagaccctctgaccctcatgtgtcctcgactagagagctcttgggaaatgctacccaacctaccagctgtgcgagtggcttgaagaaagaagaggaggggccttgggcgtatgctggccatagtgagccattgtacagctaccatcagagcacagtacccgagactaggagttacttcactcattaggagtctgatgaaagagtccttctaaaatagtcatgtataagttgaaaagttcaaaaagcattgccaagatgagtatttttcatgtaaaatataattaaaatgagatgatatgggaaagga

SEQ ID NO: 132 - DNA, 1128 bp, Mus musculus
  source 1..1128: mol_type = genomic DNA
atgatggccagctaccccgagcccgaagacacggcggggaccctgctggctccggagagcggacgcgcagtcaaagaggccgaggcgtcgccgccgagtcccggcaagggaggcgggacaacaccggagaaaccagaccccgcgcagaagcccccgtactcgtacgtggcgctcatcgccatggcgatccgcgagagcgccgagaagaggctcactctgtccggcatctaccagtacatcatagccaagttcccgttctacgagaagaacaagaagggctggcagaatagcatccgccacaacctcagcctcaacgagtgcttcatcaaggtgccgcgcgagggcggcggcgagcgcaagggcaactactggacgctcgacccggcctgcgaggacatgttcgagaagggcaactaccggcgccgccgccgcatgaagcggcccttccggccgccgcccgctcacttccagcccggcaaggggctcttcgggagcggaggagcggcgggtggctgcggcgtgcccggagctggggccgatggctatggctacctggcgccacccaagtacctgcaatcggggttcctcaacaactcctggcccctgccgcagcctccctcgcccatgccctacgcctcctgccagatggcggcggctgcggcggccgctgctgcagccgctgcagccgccggcccgggcagccccggtgcagccgcggtggtcaaggggctggcgggccccgccgcctcctacgggccgtactcgcgcgtgcagagcatggcgctgcctccgggcgtcgtgaactcctacaacggcctggggggccctcctgccgcaccaccgccgccgccaccgccgccgcaccctcacccgcaccctcacgcacatcatctgcacgcggccgctgcgcccccgccagccccgccacaccacggggctgccgcgcctcccccgggtcagctcagtcccgccagcccggccaccgccgcgcccccggcacccgcgcccacgagcgcgcccggcctgcagttcgcctgcgcccggcaacccgagctcgccatgatgcattgctcatactgggaccacgacagcaagacgggcgcgctgcactcgcgtctggatctctga

SEQ ID NO: 133 - DNA, 5779 bp, Homo sapiens
  source 1..5779: mol_type = genomic DNA
gatcccgtaagtcgggcggcctggtagtcgcagcagccgctgccgcagccgccacattcaacaggcagcagcgcagcgggcgcgccgctggggagagcaagcggcccgcggcgtccgtccgtccttccgtccgcggccctgtcagctggagcgcggcgcaggctctgccccggcccggcggctctggccggccgtccagtccgtgcggcggaccccgaggagcctcgatgtggatggccccgcgaagttaagttctgggctcgcgcttccactccgccgcgccttcctcccagtttccgtccgctcgccgcaccggcttcgttcccccaaatctcggaccgtcccttcgcgccccctccccgtccgcccccagtgctgcgttctccccctcttggctctcctgcggctgggggaggggcgggggtcaccatggccgaggcgcctcaggtggtggagatcgacccggacttcgagccgctgccccggccgcgctcgtgcacctggccgctgcccaggccggagtttagccagtccaactcggccacctccagcccggcgccgtcgggcagcgcggctgccaaccccgacgccgcggcgggcctgccctcggcctcggctgccgctgtcagcgccgacttcatgagcaacctgagcttgctggaggagagcgaggacttcccgcaggcgcccggctccgtggcggcggcggtggcggcggcggccgccgcggccgccaccggggggctgtgcggggacttccagggcccggaggcgggctgcctgcacccagcgccaccgcagcccccgccgcccgggccgctgtcgcagcacccgccggtgccccccgccgccgctgggccgctcgcggggcagccgcgcaagagcagctcgtcccgccgcaacgcgtggggcaacctgtcctacgccgacctcatcaccaaggccatcgagagctcggcggagaagcggctcacgctgtcgcagatctacgagtggatggtcaagagcgtgccctacttcaaggataagggtgacagcaacagctcggcgggctggaagaattcaattcgtcataatctgtccctacacagcaagttcattcgtgtgcagaatgaaggaactggaaaaagttcttggtggatgctcaatccagagggtggcaagagcgggaaatctcctaggagaagagctgcatccatggacaacaacagtaaatttgctaagagccgaagccgagctgccaagaagaaagcatctctccagtctggccaggagggtgctggggacagccctggatcacagttttccaaatggcctgcaagccctggctctcacagcaatgatgactttgataactggagtacatttcgccctcgaactagctcaaatgctagtactattagtgggagactctcacccattatgaccgaacaggatgatcttggagaaggggatgtgcattctatggtgtacccgccatctgccgcaaagatggcctctactttacccagtctgtctgagataagcaatcccgaaaacatggaaaatcttttggataatctcaaccttctctcatcaccaacatcattaactgtttcgacccagtcctcacctggcaccatgatgcagcagacgccgtgctactcgtttgcgccaccaaacaccagtttgaattcacccagcccaaactaccaaaaatatacatatggccaatccagcatgagccctttgccccagatgcctatacaaacacttcaggacaataagtcgagttatggaggtatgagtcagtataactgtgcgcctggactcttgaaggagttgctgacttctgactctcctccccataatgacattatgacaccagttgatcctggggtagcccagcccaacagccgggttctgggccagaacgtcatgatgggccctaattcggtcatgtcaacctatggcagccaggcatctcataacaaaatgatgaatcccagctcccatacccaccctggacatgctcagcagacatctgcagttaacgggcgtcccctgccccacacggtaagcaccatgccccacacctcgggtatgaaccgcctgacccaagtgaagacacctgtacaagtgcctctgccccaccccatgcagatgagtgccctggggggctactcctccgtgagcagctgcaatggctatggcagaatgggccttctccaccaggagaagctcccaagtgacttggatggcatgttcattgagcgcttagactgtgacatggaatccatcattcggaatgacctcatggatggagatacattggattttaactttgacaatgtgttgcccaaccaaagcttcccacacagtgtcaagacaacgacacatagctgggtgtcaggctgagggttagtgagcaggttacacttaaaagtacttcagattgtctgacagcaggaactgagagaagcagtccaaagatgtctttcaccaactcccttttagttttcttggttaaaaaaaaaaacaaaaaaaaaaaccctccttttttcctttcgtcagacttggcagcaaagacatttttcctgtacaggatgtttgcccaatgtgtgcaggttatgtgctgctgtagataaggactgtgccattggaaatttcattacaatgaagtgccaaactcactacaccatataattgcagaaaagattttcagatcctggtgtgctttcaagttttgtatataagcagtagatacagattgtatttgtgtgtgtttttggtttttctaaatatccaattggtccaaggaaagtttatactctttttgtaatactgtgatgggcctcatgtcttgataagttaaacttttgtttgtactacctgttttctgcggaactgacggatcacaaagaactgaatctccattctgcatctccattgaacagccttggacctgttcacgttgccacagaattcacatgagaaccaagtagcctgttatcaatctgctaaattaatggacttgttaaacttttggaaaaaaaaagattaaatgccagctttgtacaggtcttttctatttttttttgtttattttgttatttgcaaatttgtacaaacatttaaatggttctaatttccagataaatgatttttgatgttattgttgggacttaagaacatttttggaatagatattgaactgtaataatgttttcttaaaactagagtctactttgttacatagtcagcttgtaaattttgtggaaccacaggtatttggggcagcattcataattttcattttgtattctaactggattagtactaattttatacatgcttaactggtttgtacactttgggatgctacttagtgatgtttctgactaatcttaaatcattgtaattagtacttgcatattcaacgtttcaggccctggttgggcaggaaagtgatgtatagttatggacactttgcgtttcttatttaggataacttaatatgtttttatgtatgtattttaaagaaatttcatctgcttctactgaactatgcgtactgcatagcatcaagtcttctctagagacctctgtagtcctgggaggcctcataatgtttgtagatcagaaaagggagatctgcatctaaagcaatggtcctttgtcaaacgagggattttgatccacttcaccattttgagttgagctttagcaaaagtttcccctcataattctttgctcttgtttcagtccaggtggaggttggttttgtagttctgccttgaggaattatgtcaacactcatacttcatctcattctcccttctgccctgcagattagattacttagcacactgtggaagtttaagtggaaggagggaatttaaaaatgggacttgagtggtttgtagaatttgtgttcataagttcagatgggtagcaaatggaatagaacttacttaaaaattggggagatttatttgaaaaccagctgtaagttgtgcattgagattatgttaaaagccttggcttaagaatttgaaaatttctttagcctgtagcaacctaaactgtaattcctatcattatgttttattactttccaattacctgtaactgacagaccaaattaattggctttgtgtcctatttagtccatcagtattttcaagtcatgtggaaagcccaaagtcatcacaatgaagagaacaggtgcacagcactgttcctcttgtgttcttgagaaggatctaatttttctgtatatagcccacatcacacttgctttgtcttgtatgttaattgcatcttcattggcttggtatttcctaaatgtttaacaagaacacaagtgttcctgataagatttcctacagtaagccagctctattgtaagcttcccactgtgatgatcatttttttgaagattcattgaacagccaccactctatcatcctcattttggggcagtccaagacatagctggttttagaaacccaagttcctctaagcacagcctcccgggtatgtaactgaacttggtgccaaagtacttgtgtactaatttctattactacgtactgtcactttcctcccgtgccattactgcatcataatacaaggaacctcagagcccccatttgttcattaaagaggcaactacagccaaaatcactgttaaaatcttactacttcatggagtagctcttaggaaaatatatcttcctcctgagtctgggtaattatacctctcccaagcccccattgtgtgttgaaatcctgtcatgaatccttggtagctctctgagaacagtgaagtccagggaaaggcatctggtctgtctggaaagcaaacattatgtggcctctggtagtttttttcctgtaagaatactgactttctggagtaatgagtatatatcagttattgtacatgattgctttgtgaaatgtgcaaatgatatcacctatgcagccttgtttgatttattttctctggtttgtactgttattaaaagcatattgtattatagagctattcagatattttaaatataaagatgtattgtttccgtaatatagacgtatggaatatatttaggtaatagatgtattacttggaaagttctgctttgacaaactgacaaagtctaaatgagcacatgtatcccagtgagcagtaaatcaatggaacatcccaagaagaggataaggatgcttaaaatggaaatcattctccaacgatatacaaattggacttgttcaactgctggatatatgctaccaataaccccagccccaacttaaaattcttacattcaagctcctaagagttcttaatttataactaattttaaaagagaagtttcttttctggttttagtttgggaataatcattcattaaaaaaaatgtattgtggtttatgcgaacagaccaacctggcattacagttggcctctccttgaggtgggcacagcctggcagtgtggccaggggtggccatgtaagtcccatcaggacgtagtcatgcctcctgcatttcgctacccgagtttagtaacagtgcagattccacgttcttgttccgatactctgagaagtgcctgatgttgatgtacttacagacacaagaacaatctttgctataattgtataaagccataaatgtacataaattatgtttaaatggcttggtgtctttcttttctaattatgcagaataagctctttattaggaattttttgtgaagctattaaatacttgagttaagtcttgtcagcca

SEQ ID NO: 134 - DNA, 3340 bp, Homo sapiens
  source 1..3340: mol_type = genomic DNA
gcgcgaggccgtcgattcgctcgcggctccatcgcggcctggccggggggcggtgtctgctgcgccaggttcgctggccgcacgtcttcaggtcctcctgttcctgggaggcgggcgcggcaggactgggaggtggcggcagcgggcgaggactcgccgaggacggggctccggcccgggataaccaactctccttctctcttctttggtgcttccccaggcggcggcggcggcgcccgggagccggagccttcgcggcgtccacgtccctcccccgctgcaccccgccccggcgcgagaggagagcgcgagagccccagccgcgggcgggcgggcggcgaagatggcagaggcaccggcttccccggccccgctctctccgctcgaagtggagctggacccggagttcgagccccagagccgtccgcgatcctgtacgtggcccctgcaaaggccggagctccaagcgagccctgccaagccctcgggggagacggccgctgactccatgatccccgaggaggaggacgatgaagacgacgaggacggcgggggacgggccggctcggccatggcgatcggcggcggcggcgggagcggcacgctgggctccgggctgctccttgaggactcggcccgggtgctggcacccggagggcaagaccccgggtctgggccagccaccgcggcgggcgggctgagcgggggtacacaggcgctgctgcagcctcagcaaccgctgccaccgccgcagccgggggcggctgggggctccgggcagccgaggaaatgttcgtcgcggcggaacgcctggggaaacctgtcctacgcggacctgatcacccgcgccatcgagagctccccggacaaacggctcactctgtcccagatctacgagtggatggtgcgttgcgtgccctacttcaaggataagggcgacagcaacagctctgccggctggaagaactccatccggcacaacctgtcactgcatagtcgattcatgcgggtccagaatgagggaactggcaagagctcttggtggatcatcaaccctgatggggggaagagcggaaaagccccccggcggcgggctgtctccatggacaatagcaacaagtataccaagagccgtggccgcgcagccaagaagaaggcagccctgcagacagcccccgaatcagctgacgacagtccctcccagctctccaagtggcctggcagccccacgtcacgcagcagtgatgagctggatgcgtggacggacttccgttcacgcaccaattctaacgccagcacagtcagtggccgcctgtcgcccatcatggcaagcacagagttggatgaagtccaggacgatgatgcgcctctctcgcccatgctctacagcagctcagccagcctgtcaccttcagtaagcaagccgtgcacggtggaactgccacggctgactgatatggcaggcaccatgaatctgaatgatgggctgactgaaaacctcatggacgacctgctggataacatcacgctcccgccatcccagccatcgcccactgggggactcatgcagcggagctctagcttcccgtataccaccaagggctcgggcctgggctccccaaccagctcctttaacagcacggtgttcggaccttcatctctgaactccctacgccagtctcccatgcagaccatccaagagaacaagccagctaccttctcttccatgtcacactatggtaaccagacactccaggacctgctcacttcggactcacttagccacagcgatgtcatgatgacacagtcggaccccttgatgtctcaggccagcaccgctgtgtctgcccagaattcccgccggaacgtgatgcttcgcaatgatccgatgatgtcctttgctgcccagcctaaccagggaagtttggtcaatcagaacttgctccaccaccagcaccaaacccagggcgctcttggtggcagccgtgccttgtcgaattctgtcagcaacatgggcttgagtgagtccagcagccttgggtcagccaaacaccagcagcagtctcctgtcagccagtctatgcaaaccctctcggactctctctcaggctcctccttgtactcaactagtgcaaacctgcccgtcatgggccatgagaagttccccagcgacttggacctggacatgttcaatgggagcttggaatgtgacatggagtccattatccgtagtgaactcatggatgctgatgggttggattttaactttgattccctcatctccacacagaatgttgttggtttgaacgtggggaacttcactggtgctaagcaggcctcatctcagagctgggtgccaggctgaaggatcactgaggaaggggaagtgggcaaagcagaccctcaaactgacacaagacctacagagaaaaccctttgccaaatctgctctcagcaagtggacagtgataccgtttacagcttaacacctttgtgaatcccacgccattttcctaacccagcagagactgttaatggccccttaccctgggtgaagcacttacccttggaacagaactctaaaaagtatgcaaaatcttccttgtacagggtggtgagccgcctgccagtggaggacagcacccctcagcaccacccaccctcattcagagcacaccgtgagcccccgtcggccattctgtggtgttttaatattgcgatggtttatgggacgttttaagtgttgttcttgtgtttgttttcctttgactttctgagtttttcacatgcattaacttgcggtatttttctgttaaaatgttaaccgtccttcccctagcaaatttaaaaacagaaagaaaatgttgtaccagttaccattccgggttcgagcatcacaagcttttgagcgcatggaactccataaactaacaaattacataaactaaagggggattttctttcttcttttgtttggtagaaaattatccttttctaaaaactgaacaatggcacaattgtttgctatgtgcacccgtccaggacagaaccgtgcataggcaaaaggagtggagcacagcgtccggcccagtgtgtttccggttctgagtcagggtgatctgtggacgggaccccagcaccaagtctacgggtgccagatcagtagggcctgtgatttcctgtcagtgtcctcagctaatgtgaacagtgttggtctgctggttagaaactagaatattgatattttcaggaaagaaatcagctcagctctccactcattgccaaatgtcactaaagggtttagttttaaggagaaagaaaaggaaaaaaaaaaaaaaaa

SEQ ID NO: 135 - DNA, 1215 bp, Homo sapiens
  source 1..1215: mol_type = genomic DNA
aaatggaccgctccacacctgagctgccgccaagctaactcaatccgagccggcgcatttgagaaggcgcctgtgagggtcgctcctcagccgccgcgctcccactccgcgtccccactccgcgccgccgcgcctctgccagccccgaaggtggacgtgaagctccaacacctcgacttctgggcccgcctccatggccaggtcccgggactgctggactgggacatggggaacgagctctttctggccttcaccacatctcacctccccttagcggagcagaaacttgccaggtataaactccgaattgttaagccaccaaaattacccctagagaaaaaacccaaccctgataaggatggtccagattatgagcccaacctctggatgtgggtaaatcccaacattgtgtatccccctggaaagctggaggtctcaggacgtaggaagagggaggacctgacaagcacactcccctcctctcagccaccccagaaggaggaagatgccagctgctcagaggccgcaggggtggaatcactgtcccagtcctccagcaagcggtctccccctcggaagcggtttgccttttcccccagcacctgggagctcacagaagaggaggaggctgaggaccaggaagacagctcctctatggctctcccatcccctcacaaaagggcccccctccagagtcggaggcttcggcaagccagcagccaggcggggaggctctggtcccggccccctctcaattacttccacctaattgccctggcattaagaaacagttccccctgtggcctcaacgtgcaacagatctacagtttcactcgaaagcacttcccctttttccggacggccccggaaggctggaagaatactgtccgtcacaatctctgttttcgagacagctttgagaaagtgcctgtcagcatgcagggcggggccagcacacggcctcgatcttgcctctggaagttgaccgaggagggacaccgccgctttgcggaggaggcccgcgccttggcttccactcggctagaaagtatccaacagtgcatgagccagccagatgtgatgcccttcctctttgatctttaaccccaagaagcaacagccagctaatgctttattaaaattaccctcactaaaaaaaaaaaaaaaaaaaaaaaaaaaaaaaaaaaaaaaaaaaaaaaaaaaaaaaaaaaaaaa

SEQ ID NO: 136 - DNA, 1911 bp, Homo sapiens
  source 1..1911: mol_type = genomic DNA
ccctttccccactgtggtgtgataagaggctgccctcacagtcacaatgctcccgggtcacagaggtgctgggccccaggccagcctctgcctgggaagttctctctgggaacatctggtgggtactacaggccctattccaggccctatggcctgtggaacctcaccacgggggggagggctgggccagacggagacatcacctgtggtgtcagccccatggatgagacagagtggatacacagacatcccaaggctgaggacctaagggttgggctcatcagctgggcaggaacctacctcacctttgaggcatgcaagaatacagtcactgcaactgcgaagagtttgggcaggagacagacctgggagatcttggtgagcaatgagcatgagacacaggccgtggtgcgactaaagagcgtgcagggcctctacctgctgtgtgagtgtgatggcaccgtgtgttatggccgcccaaggaccagccaccatgggtgctttctactgcgtttccaccggaacagcaagtggaccctccagtgcctaatctctggtcgttatttggagtccaatggcaaggacgtgttttgcacttcccacgtcctctcagcttaccacatgtggaccccccgaccagccctccatgtccacgtgatcctctacagccccatccaccgctgctatgcccgggctgaccccactatgggccgcatctgggtggacgcagcagttccctgcctggaggagtgtggcttcctgttgcatttccgagatggatgctaccacctggagacctctacacaccacttcttgtcccatgtagaccggctgttctcccaaccctcatcacagacagcttttcacatgcaagtgcggcctggagggcttgtggcactgtgtgatggagaaggaggcatgttatatccacagggcacgcatctgctcttgggcatgggctgcaaccccatgaggggtgaggagtggttcatcctacagcactgcccaacctgggtcagcctcaggtcaaagactgggcggttcatctcagtcatctacgatggtgaggtgcgtgctgcttctgagcgcttaaaccgaatgtccttgttccagtttgaatgtgacagtgagagccccactgtgcagcttcgttcagccaatggctactacctatcccagaggcgccacagggcagtaatggctgatgggcaccccctggagtctgacacgttcttccgaatgcactggaactgtggcaggatcatcctgcagtcctgcagggggcgcttcctgggcattgcacccaacagcctgctgatggccaatgtcatccttccaggcccaaatgaggaatttgggattttatttgccaatcgctccttccttgtattgcgaggtcgttatggctatgtgggctcctcatcgggccatgacctcatacagtgcaaccaggatcagcccgaccgcattcatctactaccctgccgaccgggtatctaccacttccaggcacaggggggatccttctggtcaataacatcctttggcacctttcgcccttggggcaagtttgccctcaacttctgtatcgagcttcaggggagcaacttactcactgtactggcccccaatggcttctacatgcgagccgaccaaagtggcaccctgttggcagacagtgaagacattaccagagagtgtatctgggaattttaggtcaatgggatgtcacctaccaaaatccaaatcctccaggaaaaactactacactaaatggaccaggaacctcagagtcaagatccaagagaagaacatctgttacaacttttcctacccagtttagcaaaacacctgttttatgcaacaatacatcacaacaggccacccccaaaaaaaaaaaaaaaaaaaaaa

SEQ ID NO: 137 - DNA, 2607 bp, Homo sapiens
  source 1..2607: mol_type = genomic DNA
catctgcaaacatcccaaaacctttcaaccaaaatatgtatagatgagtgtgcagaccaaagtaaggacatcagtatgttacatttaaaaataagtcaaggttaaaggcggtgtcctcttttaagaacatcgcaaatacaattccagtactccaagtacgtattctgtacccagccacctgggaggactgagagacctaatggttttctgctttctggaacttctatgccaattgtgactttctcacccaaatttgtaaattcgcaaattaacatgcagcgaataattacaattgtaaacacctggaagtggaaaaggccgtgaggataaattgagaggaagagtaaacctaataccataagttgcataccagcagatctgagtatcgtcatgaataattggttagcttttccacatgccttagaagtttcagcaagcacctagcgaacatcttaatccaaatttctcaaaaaatgagagattttatttaagatcattcctcaatttatcttagactttcagctacatagttagtccggtagtgtaacagtaacgggttttacgtaaatgccaggggaaaagagaggaaagctaaataaccaagtaaatctgtatctaattaacaaattggctaaataaggtgttatcagctgcttgatatagagctgataaaatcttcagctaggcatacttgaggcctgattacagaagtgaccgtagtccacccacacacctgaaatttatttaagagaccaagctaggctcttcctggcctttaggaagaggactggcatggagaaatatgttcctcactagttctcccaagccatggcacgtcccaacaaattcctcctttggttttgctgctttgcctggctgtgttttcctattagccttggttctcaggcttctgggggagaagctcagattgctgctagtgctgagttggaatctggggctatgccttggtccttgctgcagcatatagatgagagagacagagctggcctccttcccgcgcttttcaaagttctatctgttgggcgaggtgggtcacctaggctgcagccagactccagagctttgcactacatgaagaagctctataagacatatgctaccaaggaagggattcctaaatccaatagaagtcacctctacaacactgttcggctcttcaccccctgtacccggcacaagcaggctcctggagaccaggtaacaggaatccttccatcagtggaactgctatttaacctggatcgcattactaccgttgaacacttactcaagtcagtcttgctgtacaatatcaacaactcagtttctttttcctctgctgtcaaatgtgtgtgcaatctaatgataaaggagccaaagtcttctagcaggactctcggcagagctccatactcatttacctttaactcacagtttgaatttggaaagaaacacaaatggattcagattgatgtgaccagcctccttcaacctttagtggcctccaacaagagaagtattcacatgtctataaattttacttgcatgaaagaccagctggagcatccttcagcacagaatggtttgtttaacatgactctggtgtccccctcactgatcttatatttgaatgacacaagtgctcaggcttatcacagctggtattcccttcactataaaaggaggccttcccagggtcctgaccaggagagaagtctgtctgcctatcctgtgggagaagaggctgctgaggatgggagatcttcccatcaccgtcaccgcagaggtcaggaaactgtcagttctgaattgaagaagcccttgggcccagcttccttcaatctgagtgaatacttcagacaatttcttcttccccaaaatgagtgtgagctccatgactttagacttagctttagtcagctgaagtgggacaactggattgtggctccgcacaggtacaaccctcgatactgtaaaggggactgtccaagggcagttggacatcggtatggctctccagttcacaccatggtacagaacatcatctatgagaagctggactcctcagtgccaagaccgtcatgtgtacctgccaaatacagccccttgagtgttttgaccattgagcccgatggctcaattgcctataaagagtacgaagatatgatagctacaaagtgcacctgtcgttaacaaatggtcctcttaaaaccttgagcctatttggcaaagtaactactgtgtgcctatgtgtgccttcaagagaaagcttcatatattaagtctctaaatgtagcatatgttatataaagaggagcctgtgtaggttagtaccttctatggcatctatcaggataaagggataacatcaattgttgctacagagcctttttttatttccaaatttaaatgaaatataattattgtggagaactttacatttttttccttgagtgattttttttcttttcataggagtcttattcttgatagggaaaaaaccttaattagcatcaatcctggatggacttgcagctataaataggcaattcagattgctgtagtcttaatagaagaataaatttctgtcaatggcataaaaaaaaa

SEQ ID NO: 138 - DNA, 1832 bp, Homo sapiens
  source 1..1832: mol_type = genomic DNA
cattgtggcggcggccctgcaggaccgagggtggacaggcgcttggctcgctttcgcgaagcgccgcagtccccgcgggggtccatccccaaccccagactcctgcccctgcactccttatcctttcccagcccagcggggcgcccctagcctcccagggtccacgaacactgcacaaccagaccccactcacgcacagggctcagctcgccctccacagtcaccgatccggttgactcgttcgtcatttccggcaaggttggaagccgctcttggaggtcgtgaggctgcagccagactccagagctttgcactacatgaagaagctctataagacatatgctaccaaggaagggattcctaaatccaatagaagtcacctctacaacactgttcggctcttcaccccctgtacccggcacaagcaggctcctggagaccaggtaacaggaatccttccatcagtggaactgctatttaacctggatcgcattactaccgttgaacacttactcaagtcagtcttgctgtacaatatcaacaactcagtttctttttcctctgctgtcaaatgtgtgtgcaatctaatgataaaggagccaaagtcttctagcaggactctcggcagagctccatactcatttacctttaactcacagtttgaatttggaaagaaacacaaatggattcagattgatgtgaccagcctccttcaacctttagtggcctccaacaagagaagtattcacatgtctataaattttacttgcatgaaagaccagctggagcatccttcagcacagaatggtttgtttaacatgactctggtgtccccctcactgatcttatatttgaatgacacaagtgctcaggcttatcacagctggtattcccttcactataaaaggaggccttcccagggtcctgaccaggagagaagtctgtctgcctatcctgtgggagaagaggctgctgaggatgggagatcttcccatcaccgtcaccgcagaggtcaggaaactgtcagttctgaattgaagaagcccttgggcccagcttccttcaatctgagtgaatacttcagacaatttcttcttccccaaaatgagtgtgagctccatgactttagacttagctttagtcagctgaagtgggacaactggattgtggctccgcacaggtacaaccctcgatactgtaaaggggactgtccaagggcagttggacatcggtatggctctccagttcacaccatggtacagaacatcatctatgagaagctggactcctcagtgccaagaccgtcatgtgtacctgccaaatacagccccttgagtgttttgaccattgagcccgatggctcaattgcctataaagagtacgaagatatgatagctacaaagtgcacctgtcgttaacaaatggtcctcttaaaaccttgagcctatttggcaaagtaactactgtgtgcctatgtgtgccttcaagagaaagcttcatatattaagtctctaaatgtagcatatgttatataaagaggagcctgtgtaggttagtaccttctatggcatctatcaggataaagggataacatcaattgttgctacagagcctttttttatttccaaatttaaatgaaatataattattgtggagaactttacatttttttccttgagtgattttttttcttttcataggagtcttattcttgatagggaaaaaaccttaattagcatcaatcctggatggacttgcagctataaataggcaattcagattgctgtagtcttaatagaagaataaatttctgtcaatggcataaaaaaaaa

SEQ ID NO: 139 - DNA, 1948 bp, Homo sapiens
  source 1..1948: mol_type = genomic DNA
cattgtggcggcggccctgcaggaccgagggtggacaggcgcttggctcgctttcgcgaagcgccgcagtccccgcgggggtccatccccaaccccagactcctgcccctgcactccttatcctttcccagcccagcggggcgcccctagcctcccagggtccacgaacactgcacaaccagaccccactcacgcacagggctcagctcgccctccacagtcaccgatccggttgactcgttcgtcatttccggcaaggttggaagccgctcttggaggtcgtgagcctggtctcagctccaaggcaagaacagaaatacagcatatagatgagagagacagagctggcctccttcccgcgcttttcaaagttctatctgttgggcgaggtgggtcacctaggctgcagccagactccagagctttgcactacatgaagaagctctataagacatatgctaccaaggaagggattcctaaatccaatagaagtcacctctacaacactgttcggctcttcaccccctgtacccggcacaagcaggctcctggagaccaggtaacaggaatccttccatcagtggaactgctatttaacctggatcgcattactaccgttgaacacttactcaagtcagtcttgctgtacaatatcaacaactcagtttctttttcctctgctgtcaaatgtgtgtgcaatctaatgataaaggagccaaagtcttctagcaggactctcggcagagctccatactcatttacctttaactcacagtttgaatttggaaagaaacacaaatggattcagattgatgtgaccagcctccttcaacctttagtggcctccaacaagagaagtattcacatgtctataaattttacttgcatgaaagaccagctggagcatccttcagcacagaatggtttgtttaacatgactctggtgtccccctcactgatcttatatttgaatgacacaagtgctcaggcttatcacagctggtattcccttcactataaaaggaggccttcccagggtcctgaccaggagagaagtctgtctgcctatcctgtgggagaagaggctgctgaggatgggagatcttcccatcaccgtcaccgcagaggtcaggaaactgtcagttctgaattgaagaagcccttgggcccagcttccttcaatctgagtgaatacttcagacaatttcttcttccccaaaatgagtgtgagctccatgactttagacttagctttagtcagctgaagtgggacaactggattgtggctccgcacaggtacaaccctcgatactgtaaaggggactgtccaagggcagttggacatcggtatggctctccagttcacaccatggtacagaacatcatctatgagaagctggactcctcagtgccaagaccgtcatgtgtacctgccaaatacagccccttgagtgttttgaccattgagcccgatggctcaattgcctataaagagtacgaagatatgatagctacaaagtgcacctgtcgttaacaaatggtcctcttaaaaccttgagcctatttggcaaagtaactactgtgtgcctatgtgtgccttcaagagaaagcttcatatattaagtctctaaatgtagcatatgttatataaagaggagcctgtgtaggttagtaccttctatggcatctatcaggataaagggataacatcaattgttgctacagagcctttttttatttccaaatttaaatgaaatataattattgtggagaactttacatttttttccttgagtgattttttttcttttcataggagtcttattcttgatagggaaaaaaccttaattagcatcaatcctggatggacttgcagctataaataggcaattcagattgctgtagtcttaatagaagaataaatttctgtcaatggcataaaaaaaaa

SEQ ID NO: 140 - DNA, 794 bp, Homo sapiens
  source 1..794: mol_type = genomic DNA
attcggcacgaggggaaagagggtcgtggtattgtaagcccagccggtagtgcccattctttttggggttaaaggtatgtcggatttagttctaggtgtgacggctgtgtgtctgtctgtgtgtgtacaaggctgtgtgcatctgcggtgtcagtgtgtgactttggtatgtttgtgtgtcggtgggaacgtgttaggtccacgtgccggtgggtgtatgtgaatgtgtctggttgggtgcctcctggcctacctttgtcatccctggggggcgacagctctggggtctggccaggccgctccagggcagtgggtgagcgccgctcttcccgctcgcaggcaaacctctactctggagccccttcttgcagaggcctctgcataaaaggaaaggcggccaggtgagattctccaacgaccagaccatcgagctggagaagaaattcgagacgcagaaatatctctctccgcccgagaggaagcgtctggccaagatgctgcagctcagcgagagacaggtcaaaacctggtttcagaatcgacgcgctaaatggaggagactaaaacaggagaaccctcaaagcaataaaaaagaagaactggaaagtttggacagttcctgtgatcagaggcaagatttgcccagtgaacagaataaaggtgcttctttggatagctctcaatgttcgccctcccctgcctcccaggaagaccttgaatcagagatttcagaggattctgatcaggaagtggacattgagggcgataaaagctattttaatgctggatgatga

SEQ ID NO: 141 - DNA, 2374 bp, Homo sapiens
  source 1..2374: mol_type = genomic DNA
ttggctgtcagtcggatccgagaacgacgattggctttccttgaccgtccctcaagcgcctctccggagatggtctgaggtgggagaagagctgaagagacctggagccgacagacgggtctgggtctgccgcccaggatggagtacaatggtgtgatcttggctctttgcaacctctgcctcctgggctcaagccttcctcccacctgaacctcccaagtagcgggactgcagggtgaaggccatgccgcctcctgggaaagttccccgaaaggagaatctgtggctacagtgtgagtgggggtcctgctcctttgtgtgctcaaccatggaaaagttctttgagcatgtcactcagcacctgcagcagcacctgcatggctctggggaggaggaggaagaggaagaggaggatgacccacttgaggaagaattctcctgcttgtggcaggaatgtggcttttgttctctggacagttctgctgacctcatccgccatgtctacttccactgctaccacaccaagctgaaacagtgggggctgcaggccttgcaaagccaggctgaccttggcccctgcatcctggacttccagagccggaacgtcatccctgatatccctgaccacttcctgtgtctgtgggagcactgtgagaattccttcgacaatcctgagtggttttatcggcatgtggaagcacacagtctgtgctgtgaatacgaagcagtcggcaaggacaacccggtggtgctgtgtggctggaaaggctgtacctgcaccttcaaggaccgcagtaaacttcgagagcacctccgcagccatacccaggagaaagtggtagcctgccccacctgtgggggcatgtttgccaacaataccaagttcttagatcacatccgtcgccagacctcattggatcagcagcacttccagtgttctcactgttccaagagatttgccacagagcggctattgcgggaccacatgcgcaaccatgtgaatcactataagtgccctctgtgtgacatgacctgcccgctgccttcctccctccgcaaccacatgcgctttcgtcacagtgaggaccggccctttaaatgtgactgttgtgactacagctgcaagaatcttattgacctccagaagcacctggatacccacagcgaggagccagcctacaggtgtgattttgagaactgcaccttcagtgcccgatccctctgctctatcaagtcccattaccgcaaagtacatgaaggagactctgagccaaggtacaaatgtcatgtgtgtgacaaatgcttcacacggggcaacaacctcaccgtgcaccttcgcaagaagcaccagttcaagtggccctcagggcatccccgttttcggtacaaggaacatgaagatggctatatgcggctgcagctggttcgctacgagagtgtagagctgacacagcaactgctgcggcaaccacaagagggatcgggcctgggaacgtcgctgaacgagagcagcctgcagggcattattctagaaacagtgccaggggagccaggacgtaaggaagaggaagaggagggcaagggtagcgaagggacagccctctcagcctctcaggacaaccccagttctgtcatccacgtggtgaatcagaccaatgcccaaggccagcaagagattgtctactatgtgctgtctgaagccccaggggagcctcccccagcccctgagccaccttcagggggcatcatggaaaagcttcaaggaatagctgaggagccagagatccagatggtttgaaggccgcagagccagaccatttcttccccaggtcctgaagtttgagccaggcaagtggcagtgcccctagtgggcagccgttgccaatggatgcctttaggagtggtgccgagagcagtgtggtccactctggcctgggtttgcatcattctgcagactctaaagacttcccttttctgccagactacattttgtggggagcctgaggactctggattctttgaggggatcctggatgtgtgtgttcttgttaaagaggctgttatcaggcttaaccataaccctcaagatctgcttgacagtgattaaatccttagctcacatccattcccatctttcgggctccttaggcccaaggatggcatgtgactggtccctgcaagggtcctttctttgtcaccagccaaggcattgataaccaagtagccattttcctcttaaggtttcctctacaaccccaaggactttcatgattatcctcagggacaggattggaggcattgagcgtgtttattaacaaattgtttttggtaataaaataaatgcttggactcttaaaaaaaaaaaaaaaaaaaa

SEQ ID NO: 142 - DNA, 2257 bp, Homo sapiens
  source 1..2257: mol_type = genomic DNA
ttggctgtcagtcggatccgagaacgacgattggctttccttgaccgtccctcaagcgcctctccggagatggtctgaggtgggagaagagctgaagagacctggagccgacagacgggtgaaggccatgccgcctcctgggaaagttccccgaaaggagaatctgtggctacagtgtgagtgggggtcctgctcctttgtgtgctcaaccatggaaaagttctttgagcatgtcactcagcacctgcagcagcacctgcatggctctggggaggaggaggaagaggaagaggaggatgacccacttgaggaagaattctcctgcttgtggcaggaatgtggcttttgttctctggacagttctgctgacctcatccgccatgtctacttccactgctaccacaccaagctgaaacagtgggggctgcaggccttgcaaagccaggctgaccttggcccctgcatcctggacttccagagccggaacgtcatccctgatatccctgaccacttcctgtgtctgtgggagcactgtgagaattccttcgacaatcctgagtggttttatcggcatgtggaagcacacagtctgtgctgtgaatacgaagcagtcggcaaggacaacccggtggtgctgtgtggctggaaaggctgtacctgcaccttcaaggaccgcagtaaacttcgagagcacctccgcagccatacccaggagaaagtggtagcctgccccacctgtgggggcatgtttgccaacaataccaagttcttagatcacatccgtcgccagacctcattggatcagcagcacttccagtgttctcactgttccaagagatttgccacagagcggctattgcgggaccacatgcgcaaccatgtgaatcactataagtgccctctgtgtgacatgacctgcccgctgccttcctccctccgcaaccacatgcgctttcgtcacagtgaggaccggccctttaaatgtgactgttgtgactacagctgcaagaatcttattgacctccagaagcacctggatacccacagcgaggagccagcctacaggtgtgattttgagaactgcaccttcagtgcccgatccctctgctctatcaagtcccattaccgcaaagtacatgaaggagactctgagccaaggtacaaatgtcatgtgtgtgacaaatgcttcacacggggcaacaacctcaccgtgcaccttcgcaagaagcaccagttcaagtggccctcagggcatccccgttttcggtacaaggaacatgaagatggctatatgcggctgcagctggttcgctacgagagtgtagagctgacacagcaactgctgcggcaaccacaagagggatcgggcctgggaacgtcgctgaacgagagcagcctgcagggcattattctagaaacagtgccaggggagccaggacgtaaggaagaggaagaggagggcaagggtagcgaagggacagccctctcagcctctcaggacaaccccagttctgtcatccacgtggtgaatcagaccaatgcccaaggccagcaagagattgtctactatgtgctgtctgaagccccaggggagcctcccccagcccctgagccaccttcagggggcatcatggaaaagcttcaaggaatagctgaggagccagagatccagatggtttgaaggccgcagagccagaccatttcttccccaggtcctgaagtttgagccaggcaagtggcagtgcccctagtgggcagccgttgccaatggatgcctttaggagtggtgccgagagcagtgtggtccactctggcctgggtttgcatcattctgcagactctaaagacttcccttttctgccagactacattttgtggggagcctgaggactctggattctttgaggggatcctggatgtgtgtgttcttgttaaagaggctgttatcaggcttaaccataaccctcaagatctgcttgacagtgattaaatccttagctcacatccattcccatctttcgggctccttaggcccaaggatggcatgtgactggtccctgcaagggtcctttctttgtcaccagccaaggcattgataaccaagtagccattttcctcttaaggtttcctctacaaccccaaggactttcatgattatcctcagggacaggattggaggcattgagcgtgtttattaacaaattgtttttggtaataaaataaatgcttggactcttaaaaaaaaaaaaaaaaaaaa

SEQ ID NO: 143 - DNA, 2319 bp, Homo sapiens
  source 1..2319: mol_type = genomic DNA
ttggctgtcagtcggatccgagaacgacgattggctttccttgaccgtccctcaagcgcctctccggagatggtctgaggtgggagaagagctgaagagacctggagccgacagacgggtgaaggccatgccgcctcctgggaaagttccccgaaaggagaatctgtggctacagtgtgagtgggggtcctgctcctttgtgtgctcaaccatggaaaagttctttgagcatgtcactcagcacctgcagcagcacctgcatggctctggggaggaggaggaagaggaagaggaggatgacccacttgaggaagaattctcctgcttgtggcaggaatgtggcttttgttctctggacagttctgctgacctcatccgccatgtctacttccactgctaccacaccaagctgaaacagtgggggctgcaggccttgcaaagccaggctgaccttggcccctgcatcctggacttccagagccggaacgtcatccctgatatccctgaccacttcctgtgtctgtgggagcactgtgagaattccttcgacaatcctgagtggttttatcggcatgtggaagcacacagtctgtgctgtgaatacgaagcagtcggcaaggacaacccggtggtgctgtgtggctggaaaggctgtacctgcaccttcaaggaccgcagtaaacttcgagagcacctccgcagccatacccaggagaaagtggtagcctgccccacctgtgggggcatgtttgccaacaataccaagttcttagatcacatccgtcgccagacctcattggatcagcagcacttccagtgttctcactgttccaagagatttgccacagagcggctattgcgggaccacatgcgcaaccatgtgaatcactataagtgccctctgtgtgacatgacctgcccgctgccttcctccctccgcaaccacatgcgctttcgtcacagtgaggaccggccctttaaatgtgactgttgtgactacagctgcaagaatcttattgacctccagaagcacctggatacccacagcgaggagccagcctacaggtgtgattttgagaactgcaccttcagtgcccgatccctctgctctatcaagtcccattaccgcaaagtacatgaaggagactctgagccaaggtacaaatgtcatgtgtgtgacaaatgcttcacacggggcaacaacctcaccgtgcaccttcgcaagaagcaccagttcaagtggccctcagggcatccccgttttcgcctcggccatttctgtatccccctgcctgggtttgctgccctttatgctcctacctcaccaggtacaaggaacatgaagatggctatatgcggctgcagctggttcgctacgagagtgtagagctgacacagcaactgctgcggcaaccacaagagggatcgggcctgggaacgtcgctgaacgagagcagcctgcagggcattattctagaaacagtgccaggggagccaggacgtaaggaagaggaagaggagggcaagggtagcgaagggacagccctctcagcctctcaggacaaccccagttctgtcatccacgtggtgaatcagaccaatgcccaaggccagcaagagattgtctactatgtgctgtctgaagccccaggggagcctcccccagcccctgagccaccttcagggggcatcatggaaaagcttcaaggaatagctgaggagccagagatccagatggtttgaaggccgcagagccagaccatttcttccccaggtcctgaagtttgagccaggcaagtggcagtgcccctagtgggcagccgttgccaatggatgcctttaggagtggtgccgagagcagtgtggtccactctggcctgggtttgcatcattctgcagactctaaagacttcccttttctgccagactacattttgtggggagcctgaggactctggattctttgaggggatcctggatgtgtgtgttcttgttaaagaggctgttatcaggcttaaccataaccctcaagatctgcttgacagtgattaaatccttagctcacatccattcccatctttcgggctccttaggcccaaggatggcatgtgactggtccctgcaagggtcctttctttgtcaccagccaaggcattgataaccaagtagccattttcctcttaaggtttcctctacaaccccaaggactttcatgattatcctcagggacaggattggaggcattgagcgtgtttattaacaaattgtttttggtaataaaataaatgcttggactcttaaaaaaaaaaaaaaaaaaaa

SEQ ID NO: 144 - DNA, 2330 bp, Homo sapiens
  source 1..2330: mol_type = genomic DNA
ttggctgtcagtcggatccgagaacgacgattggctttccttgaccgtccctcaagcgcctctccggagatggtctgaggtgggagaagagctgaagagacctggagccgacagacggtaagctgggggtgaaggccatgccgcctcctgggaaagttccccgaaaggagaatctgtggctacagtgtgagtgggggtcctgctcctttgtgtgctcaaccatggaaaagttctttgagcatgtcactcagcacctgcagcagcacctgcatggctctggggaggaggaggaagaggaagaggaggatgacccacttgtgctgcaggtggaaggtgacctgagccttggaaagtgtcagactcttccttttaaacccctttctacagaggaagaattctcctgcttgtggcaggaatgtggcttttgttctctggacagttctgctgacctcatccgccatgtctacttccactgctaccacaccaagctgaaacagtgggggctgcaggccttgcaaagccaggctgaccttggcccctgcatcctggacttccagagccggaacgtcatccctgatatccctgaccacttcctgtgtctgtgggagcactgtgagaattccttcgacaatcctgagtggttttatcggcatgtggaagcacacagtctgtgctgtgaatacgaagcagtcggcaaggacaacccggtggtgctgtgtggctggaaaggctgtacctgcaccttcaaggaccgcagtaaacttcgagagcacctccgcagccatacccaggagaaagtggtagcctgccccacctgtgggggcatgtttgccaacaataccaagttcttagatcacatccgtcgccagacctcattggatcagcagcacttccagtgttctcactgttccaagagatttgccacagagcggctattgcgggaccacatgcgcaaccatgtgaatcactataagtgccctctgtgtgacatgacctgcccgctgccttcctccctccgcaaccacatgcgctttcgtcacagtgaggaccggccctttaaatgtgactgttgtgactacagctgcaagaatcttattgacctccagaagcacctggatacccacagcgaggagccagcctacaggtgtgattttgagaactgcaccttcagtgcccgatccctctgctctatcaagtcccattaccgcaaagtacatgaaggagactctgagccaaggtacaaatgtcatgtgtgtgacaaatgcttcacacggggcaacaacctcaccgtgcaccttcgcaagaagcaccagttcaagtggccctcagggcatccccgttttcggtacaaggaacatgaagatggctatatgcggctgcagctggttcgctacgagagtgtagagctgacacagcaactgctgcggcaaccacaagagggatcgggcctgggaacgtcgctgaacgagagcagcctgcagggcattattctagaaacagtgccaggggagccaggacgtaaggaagaggaagaggagggcaagggtagcgaagggacagccctctcagcctctcaggacaaccccagttctgtcatccacgtggtgaatcagaccaatgcccaaggccagcaagagattgtctactatgtgctgtctgaagccccaggggagcctcccccagcccctgagccaccttcagggggcatcatggaaaagcttcaaggaatagctgaggagccagagatccagatggtttgaaggccgcagagccagaccatttcttccccaggtcctgaagtttgagccaggcaagtggcagtgcccctagtgggcagccgttgccaatggatgcctttaggagtggtgccgagagcagtgtggtccactctggcctgggtttgcatcattctgcagactctaaagacttcccttttctgccagactacattttgtggggagcctgaggactctggattctttgaggggatcctggatgtgtgtgttcttgttaaagaggctgttatcaggcttaaccataaccctcaagatctgcttgacagtgattaaatccttagctcacatccattcccatctttcgggctccttaggcccaaggatggcatgtgactggtccctgcaagggtcctttctttgtcaccagccaaggcattgataaccaagtagccattttcctcttaaggtttcctctacaaccccaaggactttcatgattatcctcagggacaggattggaggcattgagcgtgtttattaacaaattgtttttggtaataaaataaatgcttggactcttaaaaaaaaaaaaaa

SEQ ID NO: 145 - DNA, 1083 bp, Homo sapiens
  source 1..1083: mol_type = genomic DNA
atccgcccaggcatgtgcacacacacatgcatatgtgcacgcaccgtgcaggcccgctgtctggcccacaagcgcagccctcctccccaggacacctggcatgttacatgcctccaccatctggcatctccggtccacccctccccggaggaaacaatggggccactgtgacccacacagaattctggtagcctctgaggtcaccacagagataacctcaccaacccctgcaccaagagcacaagtctgtggaggccagccgtgggtgaccgtccttgatcctctttctggccacacaggtaaaggtgagggccggagctcaagaggaagcctcagcgaggaccaggaaccgggacacacctcagccatcctgtgaggggcagcccagtggagacttccagccgccctggaggtccttgcacccaagacacttcacctaccccagggagagaagcagaaaggcacttcgccactgtctccatcagtgctgttgaactcaaatactgccatgggtggaggccagcagggcagcgtgtccctagcaagacagcgactgggcaacgcacctgtgccaaaccctgccagaagcccagcacgtccaaggtgatcctgagggctgtggcggacaaggggacctgcaagtatgtgtccctggccaccctgaagaaggctgtttccaccacgggctacgacatggcccgaaatgcctatcacttcaagcgtgtgctcaaggggctggtggacaagggctcagcaggtgaccggcaggggggcctcaggctccttcaccctgggcaagaagcaggcctccaagtccaagctcaaggtcaagaggcaacgacagcagaggtggcgctctgggcagcgcccctttggacagcacaggtcactactgggctccaaacaggggcacaagcggcttatcaagggggttcgaagggtggccaagtgccactgcaattaatgaggcaggccaggcaagcagtcaggggtgccaagaccgccattggctcagtgcagtgggaataaaaggaacataacttatttcaaaaaaaaaaaaaaaaaaaaaaaaaaaaaaaaaaa

SEQ ID NO: 146 - DNA, 2561 bp, Homo sapiens
  source 1..2561: mol_type = genomic DNA
attcatatcatttttcttctccggccccatggaggaagtgagaaagttggcacagtcacgccgggcttcgcaggaccaggtcactcagtgacagatggacaatgcaagaatgaactccttcctggaataccccatacttagcagtggcgactcggggacctgctcagcccgagcctacccctcggaccataggattacaactttccagtcgtgcgcggtcagcgccaacagttgcggcggcgacgaccgcttcctagtgggcaggggggtgcagatcggttcgccccaccaccaccaccaccaccaccatcaccacccccagccggctacctaccagacttccgggaacctgggggtgtcctactcccactcaagttgtggtccaagctatggctcacagaacttcagtgcgccttacagcccctacgcgttaaatcaggaagcagacgtaagtggtgggtacccccagtgcgctcccgctgtttactctggaaatctctcatctcccatggtccagcatcaccaccaccaccagggttatgctgggggcgcggtgggctcgcctcaatacattcaccactcatatggacaggagcaccagagcctggccctggctacgtataataactccttgtcccctctccacgccagccaccaagaagcctgtcgctcccccgcatcggagacatcttctccagcgcagacttttgactggatgaaagtcaaaagaaaccctcccaaaacagggaaagttggagagtacggctacctgggtcaacccaacgcggtgcgcaccaacttcactaccaagcagctcacggaactggagaaggagttccacttcaacaagtacctgacgcgcgcccgcagggtggagatcgctgcatccctgcagctcaacgagacccaagtgaagatctggttccagaaccgccgaatgaagcaaaagaaacgtgagaaggagggtctcttgcccatctctccggccaccccgccaggaaacgacgagaaggccgaggaatcctcagagaagtccagctcttcgccctgcgttccttccccggggtcttctacctcagacactctgactacctcccactgaggcggctccagccccagacaacagcccaggcatctccttgggctgggacttcttacccaaagcacatgcttagcttatctttctttccatttacagtctctttcttcctttctaatcctatctggggagctcctggccaggataatatatttgcagataattctggaccagagacttggtgcggggttaacaccttcatccagattgggtgccagcatacattttctggtgggccttaacatccctcctgcttttaggagaattcacagaacctactgttcctttcagatgaccttttggaaaatagttccctttgccaacagaaacatgccagaaggaatcttctcatcttttatctaactatatgtacagctctcccctcccttgtccttgaaagtaggatatagcgaaaggcgagtccaggagctcaggaagaagagatgcactatatgtttacacaattaattcatcccttaatttaagtcattttcatgtgtgtgagtttgctggttgtaaatactttgtcctaagagatttatctttatacagattttctagaaatgtttaggttactaaaacagggtgggcaaactctctaaactggtacaattttataggtgaaagaaaaaattccctcatttaaacccaatcagatgcctcagagggtagccttgatttgttcttacagttaagaagccctgcagagcacaaacttcagaaacccggcttcctgtgctaagtctttcccaatctctacccctttcttctcgggccaccctctgtttaaaatttgtgctgggttattcagaacctaaaagtattattcaaaccaatttcttccttccacagttatcttagctggatataatgtattttcagctcaattgttaatgtgatggatggcacaatgaatgtatattttgtgttattcgtgaatagtcttttgcatgtcgcacaatgtttgatgtccccaaagtaccacactgagttctatcagttatcctttgtgagcctatgatattccccatttcctgtacaatcatgaacagctctgagatcctggagtgatatgatccagagcagagtttacgggtcttaggatgtctgtaataaataaatatactcaagtttcaggtatgcttaagcatccgtgtatttggctgggctacaatttgttaattcctatgaagttggcacatttcatgaggggaaagggagaagggtggtaaatattttcaaagagatgggccttttcttgaataaaagttaataacagctcctttattataatcaaagctcataatggaaaaaaagactgatgaagaaatttatgaagcagatttatttttgaaacaaacatggatacttcctgggtcaagtgctaaccttttcacctccaactggatgttgacgtatatataaacagaactcccttcaaaagccaaaaaaaaaaaaaaaa

SEQ ID NO: 147 - DNA, 2358 bp, Homo sapiens
  source 1..2358: mol_type = genomic DNA
attcatatcatttttcttctccggccccatggaggaagtgagaaagttggcacagtcacgccgggcttcgcaggaccaggtcactcagtgacagatggacaatgcaagaatgaactccttcctggaataccccatacttagcagtggcgactcggggacctgctcagcccgagcctacccctcggaccataggattacaactttccagtcgtgcgcggtcagcgccaacagttgcggcggcgacgaccgcttcctagtgggcaggggggtgcagatcggttcgccccaccaccaccaccaccaccaccatcaccacccccagccggctacctaccagacttccgggaacctgggggtgtcctactcccactcaagttgtggtccaagctatggctcacagaacttcagtgcgccttacagcccctacgcgttaaatcaggaagcagacccaccaagaagcctgtcgctcccccgcatcggagacatcttctccagcgcagacttttgactggatgaaagtcaaaagaaaccctcccaaaacagggaaagttggagagtacggctacctgggtcaacccaacgcggtgcgcaccaacttcactaccaagcagctcacggaactggagaaggagttccacttcaacaagtacctgacgcgcgcccgcagggtggagatcgctgcatccctgcagctcaacgagacccaagtgaagatctggttccagaaccgccgaatgaagcaaaagaaacgtgagaaggagggtctcttgcccatctctccggccaccccgccaggaaacgacgagaaggccgaggaatcctcagagaagtccagctcttcgccctgcgttccttccccggggtcttctacctcagacactctgactacctcccactgaggcggctccagccccagacaacagcccaggcatctccttgggctgggacttcttacccaaagcacatgcttagcttatctttctttccatttacagtctctttcttcctttctaatcctatctggggagctcctggccaggataatatatttgcagataattctggaccagagacttggtgcggggttaacaccttcatccagattgggtgccagcatacattttctggtgggccttaacatccctcctgcttttaggagaattcacagaacctactgttcctttcagatgaccttttggaaaatagttccctttgccaacagaaacatgccagaaggaatcttctcatcttttatctaactatatgtacagctctcccctcccttgtccttgaaagtaggatatagcgaaaggcgagtccaggagctcaggaagaagagatgcactatatgtttacacaattaattcatcccttaatttaagtcattttcatgtgtgtgagtttgctggttgtaaatactttgtcctaagagatttatctttatacagattttctagaaatgtttaggttactaaaacagggtgggcaaactctctaaactggtacaattttataggtgaaagaaaaaattccctcatttaaacccaatcagatgcctcagagggtagccttgatttgttcttacagttaagaagccctgcagagcacaaacttcagaaacccggcttcctgtgctaagtctttcccaatctctacccctttcttctcgggccaccctctgtttaaaatttgtgctgggttattcagaacctaaaagtattattcaaaccaatttcttccttccacagttatcttagctggatataatgtattttcagctcaattgttaatgtgatggatggcacaatgaatgtatattttgtgttattcgtgaatagtcttttgcatgtcgcacaatgtttgatgtccccaaagtaccacactgagttctatcagttatcctttgtgagcctatgatattccccatttcctgtacaatcatgaacagctctgagatcctggagtgatatgatccagagcagagtttacgggtcttaggatgtctgtaataaataaatatactcaagtttcaggtatgcttaagcatccgtgtatttggctgggctacaatttgttaattcctatgaagttggcacatttcatgaggggaaagggagaagggtggtaaatattttcaaagagatgggccttttcttgaataaaagttaataacagctcctttattataatcaaagctcataatggaaaaaaagactgatgaagaaatttatgaagcagatttatttttgaaacaaacatggatacttcctgggtcaagtgctaaccttttcacctccaactggatgttgacgtatatataaacagaactcccttcaaaagccaaaaaaaaaaaaaaaa

SEQ ID NO: 148 - DNA, 2064 bp, Homo sapiens
  source 1..2064: mol_type = genomic DNA
aaaatggggtttggtgtaaatctgggggtgtaatgttatcatatatcactctacctcgtaaaaccgacactgaaagctgccggacaacaaatcacaggtcaaaattatgagttcttcgtattatgtgaacgcgctttttagcaaatatacggcggggacttctctgttccaaaatgccgagccgacttcttgctcctttgcgcccaactcacagagaagcggctacggggcgggcgccggcgccttcgcctcgaccgttccgggcttatacaatgtcaacagccccctttatcagagcccctttgcgtccggctacggcctgggcgccgacgcctacggcaacctgccctgcgcctcctacgaccaaaacatccccgggctctgcagtgacctcgccaaaggcgcctgcgacaagacggacgagggcgcgctgcatggcgcggctgaggccaatttccgcatctacccctggatgcggtcttcaggacctgacaggaagcggggccgccagacctacacgcgctaccagacgctggagctggagaaggagttccacttcaaccgctacctgacccggcgccgccgcattgaaatcgcccacgcgctctgcctcaccgagcgccagattaagatctggttccagaaccgccgcatgaagtggaagaaagagcataaggacgaaggtccgactgccgccgcagctcccgagggcgccgtgccctctgccgccgccactgctgccgcggacaaggccgacgaggaggacgatgatgaagaagaggaagacgaggaggaatgaggggccgatccggggccctctctgcaccggacagtcggaaaagcgtctttaagagactcactggttttacttacaaaaatggaaaaaaaaaaaaaaaaagaaggaagggctggtcatggtggaggtgcgcaaggagaaacagttccagaaagtgatcacagaatacctgaatgcccaagagtcagcctggcgctcttggctgacctccaacattttaatctaagtggccgggacaaaattgaccaaaactagggggaggaggggaccagtagtactaatgacttactacaggtcattatgaaataagctaacaatactgaatctttggcgagaaaattttgctgctaagggcactgcactgtaatttgttagtaaaggctaatatagtagagattaaagctccgttgaggacaggtgccttgtctttaacacgttgtattcatcacatttaacataggagtaattgctgagggatgacttgattgtactacggtgagatgaagggttaagatttcttccccatcaccagtagcctccctagctggtgtccctgtctccatactctcctgaatccaccttccactattgtccgctggccctttccagcctgtaaactggacagttttcattcctctgcctaacatccagtcgtagcagcccatcccatctctttaaggataaaacccaaattcttggtatagtaaagctaaaccaagcgctctccctggaagggctcctgtgtttcaccaaagctgacttacgtactttccccatcttcccaggcatcttgtacgtcgttacatttatcatattggaaggtaataaatgatcttgttttcctcttttcctgggctccttattaagagcagggaacctaatttatatcctcagggcagaacaggtattcagaaaagaataatgcaagaggaaaaaagtttaatataaactagggagatcgtaacattggctaatcacgagcaaatatttatagaagacccactgtgtgctaaatggctcctaatatatacttaagatattctcccagcttggaaattctgctcacttcttgctcttgcttgcttctctggtgggcttccatccaaatttggccatgacatcagatcatatggttaatattaacaaatattgtataaattgttttcatacttaatatccaacaggttgtcaatttacgtactactggtgccttatctgtttttactgtcccatacactgcccatctggaataagcttagtgttaaaaa

SEQ ID NO: 149 - DNA, 2035 bp, Homo sapiens
  source 1..2035: mol_type = genomic DNA
gagtcgcacggagggcaaccgtcgacgggcttagcgcctcaactgtcgttggtgtatttttctggtgtcacttctgtgccttccttcaaaggttctccaaatgtcaactgtcaaggagcagctaattgagaagctaattgaggatgatgaaaactcccagtgtaaaattactattgttggaactggtgccgtaggcatggcttgtgctattagtatcttactgaaggatttggctgatgaacttgcccttgttgatgttgcattggacaaactgaagggagaaatgatggatcttcagcatggcagtcttttctttagtacttcaaagattacttctggaaaagattacagtgtatctgcaaactccagaatagttattgtcacagcaggtgcaaggcagcaggagggagaaactcgccttgccctggtccaacgtaatgtggctataatgaaatcaatcattcctgccatagtccattatagtcctgattgtaaaattcttgttgtttcaaatccagtggatattttgacatatatagtctggaagataagtggcttacctgtaactcgtgtaattggaagtggttgtaatctagactctgcccgtttccgttacctaattggagaaaagttgggtgtccaccccacaagctgccatggttggattattggagaacatggtgattctagtgtgcccttatggagtggggtgaatgttgctggtgttgctctgaagactctggaccctaaattaggaacggattcagataaggaacactggaaaaatatccataaacaagttattcaaagtgcctatgaaattatcaagctgaaggggtatacctcttgggctattggactgtctgtgatggatctggtaggatccattttgaaaaatcttaggagagtgcacccagtttccaccatggttaagggattatatggaataaaagaagaactctttctcagtatcccttgtgtcttggggcggaatggtgtctcagatgttgtgaaaattaacttgaattctgaggaggaggcccttttcaagaagagtgcagaaacactttggaatattcaaaaggatctaatattttaaattaaagccttctaatgttccactgtttggagaacagaagatagcaggctgtgtattttaaattttgaaagtattttcatttgatctttaaaaaataaaaacaaattggagacctgtgacataactctagtctctcaagattagaacgagcaaatggtaaagagattttcctctttaagaatcatttatagctctattctaatgatacccaatctgtacaggtgtaagttatacttctgaggtatgtcacatatgttagagtgccttcagatgtagtagaatatgtataatcactataatacagagctttgattcttttcacaaaccaagccctttttctagtattacaattttatcttgtactttcatccgttagagtaccagcatattcacttcattacattagcgtcatatgtttatgtataatcattataaatgtggccgggcactgcagcctgggtgaaagagtgaggctctgtctcaaaaaaaatcattataaatgcttatttttaagaccatatatatcaaaaagaaataaaaagctgagtgctgtggctcatggctgtaatcccagtgctttgggagggtgaggcaagaggatcacatgagtccaggagtttgagaccagccttggcaacatagcaacaccccatctctacaaaaataaagaaattagatgtggtggcctgcatctgtagtccagctacttgggagactgagaccagtagataacttgagcccaggagttcaaggctatgattgtgtcactgcactccagcctgggccacagaggaagactcagactcaaaagaagaagaagaacacagaagaaaagcagaaacaagaagaagatacagatgtaactttacgatgtaaaaaatctaaataagattgtattcaactctgcaagtattatactagtcatataaactcaaa

SEQ ID NO: 150 - DNA, 1318 bp, Homo sapiens
  source 1..1318: mol_type = genomic DNA
cgtgcgtgtctcgagtcgcacggagggcaaccgtcgacgggcttagcgcctcaactgtcgttggtgtatttttctggtgtcacttctgtgccttccttcaaaggtggtgctttgtccctgtgggtcatctgtactgattgcgccaagcaaagcatttgttctccaaatgtcaactgtcaaggagcagctaattgagaagctaattgaggatgatgaaaactcccagtgtaaaattactattgttggaactggtgccgtaggcatggcttgtgctattagtatcttactgaaggatttggctgatgaacttgcccttgttgatgttgcattggacaaactgaagggagaaatgatggatcttcagcatggcagtcttttctttagtacttcaaagattacttctggaaaagattacagtgtatctgcaaactccagaatagttattgtcacagcaggtgcaaggcagcaggagggagaaactcgccttgccctggtccaacgtaatgtggctataatgaaatcaatcattcctgccatagtccattatagtcctgattgtaaaattcttgttgtttcaaatccagtggatattttgacatatatagtctggaagataagtggcttacctgtaactcgtgtaattggaagtggttgtaatctagactctgcccgtttccgttacctaattggagaaaagttgggtgtccaccccacaagctgccatggttggattattggagaacatggtgattctagtgtgcccttatggagtggggtgaatgttgctggtgttgctctgaagactctggaccctaaattaggaacggattcagataaggaacactggaaaaatatccataaacaagttattcaaagtgcctatgaaattatcaagctgaaggggtatacctcttgggctattggactgtctgtgatggatctggtaggatccattttgaaaaatcttaggagagtgcacccagtttccaccatggttaagggattatatggaataaaagaagaactctttctcagtatcccttgtgtcttggggcggaatggtgtctcagatgttgtgaaaattaacttgaattctgaggaggaggcccttttcaagaagagtgcagaaacactttggaatattcaaaaggatctaatattttaaattaaagccttctaatgttccactgtttggagaacagaagatagcaggctgtgtattttaaattttgaaagtattttcatttgatctttaaaaaataaaaacaaattggagacctgtgaaaaaaaaaaaaaaaaaaaaaaaaaaaaaaaaaaa

SEQ ID NO: 151 - DNA, 2385 bp, Homo sapiens
  source 1..2385: mol_type = genomic DNA
agtggctcccgggctccctgccccgcacgacgcggcgggacttgggagccccgaaccctccaggggacgctgacctaggaggagcgcgtctcgcgccactcggcctggtggccgcgatgctgctggaaacggggctcgagcgcgaccgagcgaggcccggggccgccgccgtctgcaccttgggcgggactcgggagatcccgctgtgcgctggctgtgaccagcacatcctggaccgcttcatcctcaaggctctggaccgccactggcacagcaagtgtctcaagtgcagcgactgccacacgccactggccgagcgctgcttcagccgaggggagagcgtttactgcaaggacgactttttcaagcgcttcgggaccaagtgcgccgcgtgccagctgggcatcccgcccacgcaggtggtgcgccgcgcccaggacttcgtgtaccacctgcactgctttgcctgcgtcgtgtgcaagcggcagctggccacgggcgacgagttctacctcatggaggacagccggctcgtgtgcaaggcggactacgaaaccgccaagcagcgagaggccgaggccacggccaagcggccgcgcacgaccatcaccgccaagcagctggagacgctgaagagcgcttacaacacctcgcccaagccggcgcgccacgtgcgcgagcagctctcgtccgagacgggcctggacatgcgcgtggtgcaggtttggttccagaaccgccgggccaaggagaagaggctgaagaaggacgccggccggcagcgctgggggcagtatttccgcaacatgaagcgctcccgcggcggctccaagtcggacaaggacagcgttcaggaggggcaggacagcgacgctgaggtctccttccccgatgagccttccttggcggaaatgggcccggccaatggcctctacgggagcttgggggaacccacccaggccttgggccggccctcgggagccctgggcaacttctccctggagcatggaggcctggcaggcccagagcagtaccgagagctgcgtcccggcagcccctacggtgtccccccatcccccgccgccccgcagagcctccctggcccccagcccctcctctccagcctggtgtacccagacaccagcttgggccttgtgccctcgggagcccccggcgggcccccacccatgagggtgctggcagggaacggacccagttctgacctatccacggggagcagcgggggttaccccgacttccctgccagccccgcctcctggctggatgaggtagaccacgctcagttctgacccaggcccggctccaccctgcacctcacacgagggagctgcccctgggtgggcggctcggggctgctggggtttccgaggaagtggggccagggcgtcaagggagggctggtgccttcggagcctcccactgccgaccgcacagctccctctctgggggctgagggacccacctggcccctcctctgacacagggctggcccgccaggtggcctcccagcaagccagccttttttgtaagcaaatttctcccctttattgaccaattaactgagcacttgctgctatttctagacatgaaatgtcaccttgctgaggcccagcccagcccagcatagcccgagggctggaaaaacgctttcatctctaaaactgagaaatcatcataattgtgctttcacttcccaggctccatgtgtcttggagccgtcaccccgaggctccctctttaggtcggagattggccttgcctgtcgaggcaagaggctgcagaggcggggacacacctgtgtcctccgggagaggccccctcctctccccagaccacagggggcctctctgcctccagccccaccttccccgggagaagctttccccaatccccaggtctctagatcattctgttctcgagtatcctgtggaggaggcaaaaatgcctggcgccccttctctccaagctcaattctctaagcccctcagggtctcctcctcaccccaccccaggcccttggtgtccaggctgcacccacagatgtctgttgccaaacagcctgccctccctgccggagccggctctgccagccccagattgggaagtctccccgctggagaagggtggggctcctctgagcctgccctgcctcctccatcagatcctttgggaagaagtttctgggagatgcccgcagctgtgcgtgccccagacacaaaggctggcctgtgtgtaagtcaaagtcactcccgcaaacctgaatctcgagctacctattggttctgtgaatgttctgtgtcttttatttattctcgggtgatcagctctttccaagacttcaataaatttgtcagttacagtcaa

SEQ ID NO: 152 - DNA, 2434 bp, Homo sapiens
  source 1..2434: mol_type = genomic DNA
agggcggcccgcgggcgcagcgcccagcagcacccggagtcgcttggacgccggttcggggctattgcggggtggcgtcgctgggcccgggaaagttcgggactggagagtggcgacgccgggcggcgggacccatggaggcgcgcggggagctgggcccggcccgggagtcggcgggaggcgacctgctgctagcactgctggcgcggagggcggacctgcgccgagagatcccgctgtgcgctggctgtgaccagcacatcctggaccgcttcatcctcaaggctctggaccgccactggcacagcaagtgtctcaagtgcagcgactgccacacgccactggccgagcgctgcttcagccgaggggagagcgtttactgcaaggacgactttttcaagcgcttcgggaccaagtgcgccgcgtgccagctgggcatcccgcccacgcaggtggtgcgccgcgcccaggacttcgtgtaccacctgcactgctttgcctgcgtcgtgtgcaagcggcagctggccacgggcgacgagttctacctcatggaggacagccggctcgtgtgcaaggcggactacgaaaccgccaagcagcgagaggccgaggccacggccaagcggccgcgcacgaccatcaccgccaagcagctggagacgctgaagagcgcttacaacacctcgcccaagccggcgcgccacgtgcgcgagcagctctcgtccgagacgggcctggacatgcgcgtggtgcaggtttggttccagaaccgccgggccaaggagaagaggctgaagaaggacgccggccggcagcgctgggggcagtatttccgcaacatgaagcgctcccgcggcggctccaagtcggacaaggacagcgttcaggaggggcaggacagcgacgctgaggtctccttccccgatgagccttccttggcggaaatgggcccggccaatggcctctacgggagcttgggggaacccacccaggccttgggccggccctcgggagccctgggcaacttctccctggagcatggaggcctggcaggcccagagcagtaccgagagctgcgtcccggcagcccctacggtgtccccccatcccccgccgccccgcagagcctccctggcccccagcccctcctctccagcctggtgtacccagacaccagcttgggccttgtgccctcgggagcccccggcgggcccccacccatgagggtgctggcagggaacggacccagttctgacctatccacggggagcagcgggggttaccccgacttccctgccagccccgcctcctggctggatgaggtagaccacgctcagttctgacccaggcccggctccaccctgcacctcacacgagggagctgcccctgggtgggcggctcggggctgctggggtttccgaggaagtggggccagggcgtcaagggagggctggtgccttcggagcctcccactgccgaccgcacagctccctctctgggggctgagggacccacctggcccctcctctgacacagggctggcccgccaggtggcctcccagcaagccagccttttttgtaagcaaatttctcccctttattgaccaattaactgagcacttgctgctatttctagacatgaaatgtcaccttgctgaggcccagcccagcccagcatagcccgagggctggaaaaacgctttcatctctaaaactgagaaatcatcataattgtgctttcacttcccaggctccatgtgtcttggagccgtcaccccgaggctccctctttaggtcggagattggccttgcctgtcgaggcaagaggctgcagaggcggggacacacctgtgtcctccgggagaggccccctcctctccccagaccacagggggcctctctgcctccagccccaccttccccgggagaagctttccccaatccccaggtctctagatcattctgttctcgagtatcctgtggaggaggcaaaaatgcctggcgccccttctctccaagctcaattctctaagcccctcagggtctcctcctcaccccaccccaggcccttggtgtccaggctgcacccacagatgtctgttgccaaacagcctgccctccctgccggagccggctctgccagccccagattgggaagtctccccgctggagaagggtggggctcctctgagcctgccctgcctcctccatcagatcctttgggaagaagtttctgggagatgcccgcagctgtgcgtgccccagacacaaaggctggcctgtgtgtaagtcaaagtcactcccgcaaacctgaatctcgagctacctattggttctgtgaatgttctgtgtcttttatttattctcgggtgatcagctctttccaagacttcaataaatttgtcagttacagtcaaaaaaaaaaaaaaaaaa

SEQ ID NO: 153 - DNA, 2700 bp, Homo sapiens
  source 1..2700: mol_type = genomic DNA
actgggagatgggctggagccggcggggtccacagccagggaggcgggtgcaatatgtcagtaaatcccggtcccttcagcgggcactcctctcttccagagactttttctaagtgaagagggagtcctcagcccttgacacctggaaaacccgctcacagactcgaggctcccacagggcacccttggacctccccagtgtggttcctccagggggcctgcagtaccgaagtggggtgtggggggcagaagcagcgggaagccagacgtttgagtaactctgacggtgttgggggcacccacgcctgacacaaaggcagtggatcggcttgtccagtccactcataagtaattttgcggctgcccaatgatggggaaggcattgatatttaccccggaggcctgcagacagggccaccaggcagggcagccacatttgcgaggagtccctagaaagagtggccatgacgcttaacatgaaggagacccgatggggtgccccagctccagagatcccgctgtgcgctggctgtgaccagcacatcctggaccgcttcatcctcaaggctctggaccgccactggcacagcaagtgtctcaagtgcagcgactgccacacgccactggccgagcgctgcttcagccgaggggagagcgtttactgcaaggacgactttttcaagcgcttcgggaccaagtgcgccgcgtgccagctgggcatcccgcccacgcaggtggtgcgccgcgcccaggacttcgtgtaccacctgcactgctttgcctgcgtcgtgtgcaagcggcagctggccacgggcgacgagttctacctcatggaggacagccggctcgtgtgcaaggcggactacgaaaccgccaagcagcgagaggccgaggccacggccaagcggccgcgcacgaccatcaccgccaagcagctggagacgctgaagagcgcttacaacacctcgcccaagccggcgcgccacgtgcgcgagcagctctcgtccgagacgggcctggacatgcgcgtggtgcaggtttggttccagaaccgccgggccaaggagaagaggctgaagaaggacgccggccggcagcgctgggggcagtatttccgcaacatgaagcgctcccgcggcggctccaagtcggacaaggacagcgttcaggaggggcaggacagcgacgctgaggtctccttccccgatgagccttccttggcggaaatgggcccggccaatggcctctacgggagcttgggggaacccacccaggccttgggccggccctcgggagccctgggcaacttctccctggagcatggaggcctggcaggcccagagcagtaccgagagctgcgtcccggcagcccctacggtgtccccccatcccccgccgccccgcagagcctccctggcccccagcccctcctctccagcctggtgtacccagacaccagcttgggccttgtgccctcgggagcccccggcgggcccccacccatgagggtgctggcagggaacggacccagttctgacctatccacggggagcagcgggggttaccccgacttccctgccagccccgcctcctggctggatgaggtagaccacgctcagttctgacccaggcccggctccaccctgcacctcacacgagggagctgcccctgggtgggcggctcggggctgctggggtttccgaggaagtggggccagggcgtcaagggagggctggtgccttcggagcctcccactgccgaccgcacagctccctctctgggggctgagggacccacctggcccctcctctgacacagggctggcccgccaggtggcctcccagcaagccagccttttttgtaagcaaatttctcccctttattgaccaattaactgagcacttgctgctatttctagacatgaaatgtcaccttgctgaggcccagcccagcccagcatagcccgagggctggaaaaacgctttcatctctaaaactgagaaatcatcataattgtgctttcacttcccaggctccatgtgtcttggagccgtcaccccgaggctccctctttaggtcggagattggccttgcctgtcgaggcaagaggctgcagaggcggggacacacctgtgtcctccgggagaggccccctcctctccccagaccacagggggcctctctgcctccagccccaccttccccgggagaagctttccccaatccccaggtctctagatcattctgttctcgagtatcctgtggaggaggcaaaaatgcctggcgccccttctctccaagctcaattctctaagcccctcagggtctcctcctcaccccaccccaggcccttggtgtccaggctgcacccacagatgtctgttgccaaacagcctgccctccctgccggagccggctctgccagccccagattgggaagtctccccgctggagaagggtggggctcctctgagcctgccctgcctcctccatcagatcctttgggaagaagtttctgggagatgcccgcagctgtgcgtgccccagacacaaaggctggcctgtgtgtaagtcaaagtcactcccgcaaacctgaatctcgagctacctattggttctgtgaatgttctgtgtcttttatttattctcgggtgatcagctctttccaagacttcaataaatttgtcagttacagtcaa

SEQ ID NO: 154 - DNA, 2393 bp, Homo sapiens
  source 1..2393: mol_type = genomic DNA
agaggcaagaggctagcggctggaccacttgtgctggagtggtaaagaactatcatgaatccatttactgaaagtgtccatttctgaactcaccctaaagaggacaaacaccgcaaagtagttaaaagtcaggcattcgcgtcggacgtctgggtttgaattctgccctggcttgactggaaacgcttcccctatttcttccgtagcggaccgggagagcttactggcgctctgcgaaccggctggaaagaaacaccgagtcactcgtacagactcttggtcgcagaacttggctttccgctattggtcctccagaaccgcttgaaacaactggccccagctggcgcatcagaccgcagtgaggaatgccgcggggcgggtggcgaaggcagggtctgcccgccagtggattcccgggtgtcccgcgtggagcaggcttgcccagctgggaagcccatcaaacctcagtcttggcccacagtgggagagagaccagtgggtcccagacggaggccctcgcccgcttttggcgacctccactggcgtgaataaaagcacccctctcttaccctcagaaactgtgggtagcaaggtataaaacggagtctgggaccggtaagtcccaaggtgagcccgtatacagctctgccatctctgaggggttatgcagattctgagcaggtgtcaggggctcatgtcagaggagtgcgggcggactacagccctggcggccgggaggactcgcaaaggcgccggggaagagggactggtgagccccgagggagcgggggacgaggactcgtgctcctcctcggccccgctgtccccgtcgtcctcgccccggtccatggcctcgggctccggctgccctcctggcaagtgtgtgtgcaacagttgcggcctggagatcgtggacaaataccttctcaaggtgaatgacctatgctggcatgtccggtgtctctcctgcagtgtttgcagaacctccctaggaaggcacaccagctgttatattaaagacaaagacattttctgcaaacttgattatttcagaaggtatggaactcgctgctctcgatgtgggagacacatccattctactgactgggtccggagagccaaggggaatgtctatcacttggcatgctttgcctgcttttcctgcaaaaggcaactttccacaggagaggagtttgctttggtggaagagaaagtcctctgcagagtacattatgactgcatgctggataatttaaaaagagaagtagaaaatgggaatgggattagtgtggaaggtgccctcctcacagagcaagatgttaaccatccaaaaccagcaaaaagagctcggaccagctttacagcagatcagcttcaggttatgcaagcacaatttgctcaggacaacaacccagatgcacagacactccagaaattggcagaaaggacaggcttgagcagacgtgtgatacaggtgtggtttcagaattgtagagcacgccacaagaaacacgtcagtcctaatcactcatcctccaccccagtcacagcagtcccaccctccaggctgtctccacccatgttagaagaaatggcttattctgcctacgtgccccaagatggaacgatgttaactgcgctgcatagttatatggatgctcattcaccaacaactcttggactccagcccttgttaccccattcaatgacacaactgccaataagtcatacctaattcttttttcagggatagacttgattaaggatataaatttgtcatttattatgtataaaataccattgaaaagatattactgttaattttttatttaacacctaaagcatttccaacatcactttgctgcccaggtatgtatctatagttggcctgcaagacacttttattaattcttcattttttgtaaaacttatgtttacaagaagaaaacaaatcaaaacattttttgtattgtctggaaatagttcactctagtgtgtatctgttaatttatttgtcatcaaaagagcactttgcctaaaagaaaggactgacaagtgtgcaaaatgtttacaatcttttgtgaaattgtagtttatcattagtttgtatctgtaagttattgtaataaatattacctgtattttttgttatatacaactttatactttgaagcttgtatctgtgaatttgcaactgaaatttattttgccaatgttttctgaatgaactgaataaagcttctgttgtagcatgccatgcaaacacattattgtgtttgtggttgatgaattatggctgtaaataacactatagtttaataagcccaccattctgagtttattaaacattttccattcttgtgaaaatttcaaaaaaaaaaaaaaaaaaaaaa

SEQ ID NO: 155 - DNA, 7865 bp, Homo sapiens
  source 1..7865: mol_type = genomic DNA
agtccccaacccaatctacaggcactgggaacttgcaagcagccagggaacgctgaaaatagcacgtctttttctttctttgtgttcaaaactattttctttcttcaccagattttgttttcctccccccgctgcagttgtttcccattagtaactcgatctctcagagcagtaagattcgccttctacgcctctttttccctccgcccgaattgtttgttttctgcacatctccttcagggagccgctgaggcttccccccaactcttcccagttctttttgcttcccctcggccccccaagcagaccgatttccactccatctgtttcttctcctcctttctctccctctttccctccatcctcgagcgtctctgcgctcctacagggcagccctctctggtcccttgcctccttcactcggatgagctgaaagccccgggcgtgtgtatatggaaatagtggggtgccgagcagaagacaactcgtgtcctttccgccccccagccatgctctttcacgggatctccggaggccacatccaaggcatcatggaggagatggagcgcagatccaagactgaggcccgtctggccaaaggcgcccagctcaacggccgcgacgcgggcatgcccccgctcagcccggagaagcccgccctgtgcgccggctgcgggggcaagatctcggacaggtactatctgctggctgtggacaaacagtggcatctgagatgcctgaagtgctgtgaatgtaagctggccctcgagtccgagctcacctgctttgccaaggacggtagcatttactgcaaggaggattactacagaaggttctctgtgcagagatgtgcccgctgccaccttggcatttccgcctcggagatggtcatgcgcgcccgagactctgtctaccacctgagctgcttcacctgctccacttgcaacaagactctgaccacgggcgaccatttcggcatgaaggacagcctggtgtactgccgcgcccacttcgagaccctcttgcaaggagagtatccaccgcagctgagctacacggagctggcggccaagagcggcggcctggccctgccttacttcaacggtacgggcaccgtgcagaaagggcggccccggaagcggaagagcccagcgctgggagtggacatcgtcaattacaactcaggttgtaatgagaatgaggcagaccacttggaccgggaccagcagccttatccaccctcgcagaagaccaagcgcatgcgaacctctttcaagcatcaccagctccggaccatgaaatcctactttgccatcaaccacaacccggatgccaaggacctcaagcagcttgcccagaaaacaggtctgaccaaaagagttttgcaggtttggttccaaaacgcacgagccaaattcagaaggaaccttttgcggcaggagaatgggggtgttgataaagctgacggcacgtcgcttccggccccgccctcagcagacagcggagctctcactccacccggcactgcgaccactttaacagacctgaccaatcccactatcactgtagtgacatccgtgacctctaacatggacagccacgaatccggaagcccctcacaaactaccttaacaaaccttttctaacattggttttttttttttagtttttaaattcttcctcttctttttattattattctaattattattattttattatttacaagactttttttttcttctaacccacaagatatttggggaataaaaataacagcttggtgtgtagcatctgcagccacttggcaaatgagtttacagtattgtctcctttaagtgaatatattttgtctacaaagtgtatttggatttaaaaaaattaattaggtctttcagttggtaaggagagtttttgaataattctaataagtgcctcttaaaattgtatgttacttatttccagaatctcgaagaaaaaagaaaaaagagtggtattattatgggcaaataatcatattcccacttaaatgattaggttaataaagaaccagataattaattagttactttttaaatcttgcaattgtatgtgtgattatggagttttgaaaacgttacattttttaaatcttaaaactgaaaacttgtttttagtatttctatttcttacctgaactgttaattcaagtgaggaatatgatgaaataaaagcattaactacagacattttaaatagtaatgattaattaggtgagaaatctattacaggaatgtgacttttccttctcttaggggtgtacaactctaaaaactttttacttggttatttgtttttcaacatttgaaaaatacttaagctccctatgtatccatgaaaattccgcattgattttgacattccatacttttaacctcctaaagctaaaaacaatagctcggaaaccattctttctagttactttttttcccagggaaaatggaaataagcaaaatataatgttttaagaagtaaaaaaatcaatataatttaattaatagctctattaattggcttcagctgtaccatgatattgtatctggcattctatatgaataatgtttaaaatacccagcctggtagacttataccaacaattggttttgttttgttttattttattttgacataggttgacttatgtattgaaaataatttttctgatattagagatttgaagttattagtcttaaagtagataaactcagaagccttgtggatgctgatctgaatatatttcctagtttacagtagcatttttttcttttaatttaagctaaaatcttaatggtctgggcagtggtgaatgttcatctattacgcttctgttgtagttaaataccaattagattgtggatttcctaaaaaaataaaaaagaagtcaagatatatgtcttgctttagtggattgttaagaataactttgcacatattttccactttttggaccccttaaatctcctttggtggtcgaagtggctatttaatagattttaaaggtgtccttctggctgtataaatgtgtggttacatattgacagttcactgcccacattaaagtgcattattgtaacttttgctcagggtctttagaaaattagcacagaaagtagcttattttttaaaaaaagatgatggaagataagttaacactgtaacagaagaaaggtgtgattgccattatatatttagcaagtatggttatcatcttatatggagcttaaatcttgacttttcatacttctattacattttgggcatttaccactaaccagaccaaacaaccttggtaaggctgagatcttattaatacacttttacaggtaaaatattgacacttataaattttgttctttgacagaacaatatatggtactatatagatctactttattaagtagactaattataactcagttctcctatgtgccttatgatataacttggaagtaagtttgtgaaaaatcaggatatatgtgttgtttgttaaattaactgttttaagcccttttaacacctcactagttttgtactgttttacctcttatttctgaaactctttttatggtgtatcctgttagaggggacaaacatgtcatagaaagcagttgtgcactctttcaaatatagttgataaattcaataatcttatatattgagcttcgtgtttatagtacagtaagtggtctagcaaaattgtccatgtttctttgtttattgataaatgcattgtatagaaactatttcccctaaatatttatggaccaaacaattgtgatatatcctattaaatttgtgtgaataaaacattttgaatctaaggagttttctttcccatcagttttatttaagttttaaccgtactagtgtgttccagcatctatatgtaaaagcttttcaaatggtaatacaacattgttagaaatatttaaacatacaaatagtttttagacttccaaacttctgattcatatgaaatgttacacattgttgcacaggcagtgtaattcaacctagaaatacctttgaatatatttgcttataacaaaagtaatgccccactgatttgactcagtccaatttttagaataaaaaggctaattagcatataaagtaattgcatggaacgaaaccttaaatatgattaagatttcatgttaggtctattgagcacaaatggatatttgtaaatctaaatagaaattgcagacccctaaaagccaagttgctctgtagttaataaattgtcactatgatttttttcagggagaacaaatcttggggcattacagccaaacatcccgacgtttgaaaattccctaaagtattaaaagaaggggaaaagtttgatcggaaatccactgcagtgaagacaaagacactattaggttatgataatcatacattaaaaaatttattaagccaaaaaaaaagagagagagagagacttaaatgtcatttactgaatgttaacgaaacttgtgttctttatggtgtctaacacaactgaaggcctaaaattatgtggtttaaacaaaattagataaaccatgtacaaaaccagagcaacctggcagtaatatgcccaccccatatttgaaaaaaattattattgaaaaaaatttcacacatttgtcaagcacagttgtaaaataaagtccaaaacattcatttcacctgcttgctaatgtgtattagtcctgttaatggcattttccaactgtaaattcaaagaaaagctatcacccatttaagagtatagggatcaaaccccagtaattttagcattattgtttatcacttcctttttaaacagaaatctctgcatgcacttttacatatgtcacctctagtgtacacctctgtatgatgacttatctttgctgtttcttgtatgataaatagctttcattaataaacatttatttgatgcaaacatagttaactttatgttaaacacatgctgttgaaattaattttgaacacttaaagaggcagcacagtacatttacaacttgttatactaatgaaaaaatacaaacagcatagtgagattaaattctggtaatctaggataaaattacttacttggtttttaccttttcatgacttattttcatttgttgtattcaattgccacatgtattaaaaataaaaaacaaagtgaacccaaattacaacaaaataaaccttagaataaactattgtgtaaaatttcagcaacttttttagattactagggtaaaatttatagatcctatgtgagtttacatgtttgctatgcaatgaacaaatttattgatgtatacaaatatattctgaactataaaaagatccaatctttgcatagttcaattacatatgattattacaaacaaaaaagcaaatggaaagacagacaaatatttaggaatgaggttttttttaattgttaaagggaatatttgaagaataaaattttagctattcctatttagccgtatatccaaagcatatgttaaacaaactaacatatactttccagaaaatttttcattatgatgaaatttttattatatacaaatgaaccctatgtaaatgatgtaacttttatgaatgacagacattaaatatttcacttacatgtattctcagaattttgaatgttttcttaaatgctttcacttcctgaataataaaaagaaaaaattttaaagaagagagagcaacttactaataaaaaaaagcaatgcaccatgacaagtagactattttgagtgatcacaaatcatgctggttttgtcagtaacttgaatgtttatgcctcattgaaacctcatccacagctatagcaacttaaatagattttccaatgcatttccagccagtttattcaaatctttgccctacagtcttgccttctttccctgttctgtcacctgtggcaatttcatttagaagtattttggaacttcgcctggttttacagacctttaaatatttgtctggtatgtgaaatgcaggaagagaccagagagggaaagaacataactgaaattagacatctgaaaaaaaaatacaaatttgaaacaggcacattttttaaaaccaaaaaaaaaaaaaaaaagagagagagagagaaaggagtactaattatgtgagtgggaagaggaagcgtgtgatgcagagctggaaggtctgttgtgctttactgtgatgtaaagcagtctttgagtctgggcaactgcacatttactgtttggtgtggaatagaaaaatgtggacctcttagttgagagcaggacactaaattttcatagcttctacctcccagttgcctgggttagtctaacttctggcagattgatcttgggcaaaaagcttcactgagagttagtgtctgtgtgctttggttgaatagccaccttaatactgacttacatagtgggtaggtttttgatacctcaaataaggataaaactccataataaaggacccaaagcaaatacttttaaaacttaggtgatttttcatcacctaaaacataaatagctttatttagcaaaatcccagtggaatctaccacacattcttttataataacccttttttgggagtcaaagtattgtttttttattagccacatataaatatcatctcattttctgttgcagtgtgactgcaaggcatgttgtggtggaaatcattagaactgggaagctctggaatggaaatttggaatcgtgtcattctaggctcttaaagagaatattagggataatactgttgtaaaaaataaatataaacacctaattttgtatgaagttttgctatttaaattttaactatgttataaacaaagctagctttacttgtagagagttcgtgtactcttgagctcattcaatagcttttacattttgtagtctcttccacaacagggcaaaataagcacagtaggacttagtccaaattgacgaaatatcattgaattttctttgaaagcatatatatagataaactctggattggtcttttagatctgttttctgtttttagtaattgggaacaaactcttgatattaaaataaataaaatgcctctaatgtaaagccacagccctgcttctagccaatgtcaaaaataggaagtttttttaatggtttactgttgattttaaacattttaataatagtgctctgccctcacaacagtttttttttcagaataatattatgatttaccttattttaaaaataaattataattctaacttaaaatattattttaaatgcccctctgggaagatttccgttttattttatgaggttccctggcagttgggggggtggtgaggttgggagagggaaagtttagaactgtgcatgatactcaaggaaaagtctatgaatatgatgtaagtagtaacattattgccacaactaaatttctgtttaactgtgttgcagaatatgataatgtcatctaacatcactccctacttgcaacattcctctgtgaatattaatatagttaaccctcccttattatgtatcatatcaataagtttctcttcccttggattaatttttgcttctttgcattacattttatcttgtgctaagataacaaaaagcaagcaagaataaagatccagatattagccatatgtagaaagttcctggtgtgcatttctgtgtacttttccctcacatattagaattgtcaggaaagtttttttcttttggaactttctgtttacattttgcatgatcttataaattaacctgaagagtaattggataccttttatggttatttgaaaataaaatttgctacaaataaga

SEQ ID NO: 156 - DNA, 2078 bp, Homo sapiens
  source 1..2078: mol_type = genomic DNA
gcgtgatccactccttttcctctaagaatgctgaacggtaccactctagaggcagccatgctctttcacgggatctccggaggccacatccaaggcatcatggaggagatggagcgcagatccaagactgaggcccgtctggccaaaggcgcccagctcaacggccgcgacgcgggcatgcccccgctcagcccggagaagcccgccctgtgcgccggctgcgggggcaagatctcggacaggtactatctgctggctgtggacaaacagtggcatctgagatgcctgaagtgctgtgaatgtaagctggccctcgagtccgagctcacctgctttgccaaggacggtagcatttactgcaaggaggattactacagaaggttctctgtgcagagatgtgcccgctgccaccttggcatttccgcctcggagatggtcatgcgcgcccgagactctgtctaccacctgagctgcttcacctgctccacttgcaacaagactctgaccacgggcgaccatttcggcatgaaggacagcctggtgtactgccgcgcccacttcgagaccctcttgcaaggagagtatccaccgcagctgagctacacggagctggcggccaagagcggcggcctggccctgccttacttcaacggtacgggcaccgtgcagaaagggcggccccggaagcggaagagcccagcgctgggagtggacatcgtcaattacaactcaggttgtaatgagaatgaggcagaccacttggaccgggaccagcagccttatccaccctcgcagaagaccaagcgcatgcgaacctctttcaagcatcaccagctccggaccatgaaatcctactttgccatcaaccacaacccggatgccaaggacctcaagcagcttgcccagaaaacaggtctgaccaaaagagttttgcaggtttggttccaaaacgcacgagccaaattcagaaggaaccttttgcggcaggagaatgggggtgttgataaagctgacggcacgtcgcttccggccccgccctcagcagacagcggagctctcactccacccggcactgcgaccactttaacagacctgaccaatcccactatcactgtagtgacatccgtgacctctaacatggacagccacgaatccggaagcccctcacaaactaccttaacaaaccttttctaacattggttttttttttttagtttttaaattcttcctcttctttttattattattctaattattattattttattatttacaagactttttttttcttctaacccacaagatatttggggaataaaaataacagcttggtgtgtagcatctgcagccacttggcaaatgagtttacagtattgtctcctttaagtgaatatattttgtctacaaagtgtatttggatttaaaaaaattaattaggtctttcagttggtaaggagagtttttgaataattctaataagtgcctcttaaaattgtatgttacttatttccagaatctcgaagaaaaaagaaaaaagagtggtattattatgggcaaataatcatattcccacttaaatgattaggttaataaagaaccagataattaattagttactttttaaatcttgcaattgtatgtgtgattatggagttttgaaaacgttacattttttaaatcttaaaactgaaaacttgtttttagtatttctatttcttacctgaactgttaattcaagtgaggaatatgatgaaataaaagcattaactacagacattttaaatagtaatgattaattaggtgagaaatctattacaggaatgtgacttttccttctcttaggggtgtacaactctaaaaactttttacttggttatttgtttttcaacatttgaaaaatacttaagctccctatgtatccatgaaaattccgcattgattttgacattccatacttttaacctcctaaagctaaaaacaatagctcggaaaccattctttctagttactttttttcccagggaaaatggaaataagcaaaatataatgttttaagaagtaaaaaaatcaatataatt

SEQ ID NO: 157 - DNA, 65 bp, Mus musculus
  source 1..65: mol_type = genomic DNA
agggattggagagaaaggcagttcctgatggtcccctcccaggggctggctttcctctggtcctt

SEQ ID NO: 158 - DNA, 91 bp, Mus musculus
  source 1..91: mol_type = genomic DNA
gggcagcgcgccggcaccttggctctagactgcttactgcccgggccgccttcagtaacagtctccagtcacggccaccgacgcctggccc

SEQ ID NO: 159 - DNA, 95 bp, Mus musculus
  source 1..95: mol_type = genomic DNA
ctcatctgtctgttgggctgggggcagggcctttgtgaaggcgggttatgctcagatcgcctctgggcccttcctccagtcccgaggcagattta

SEQ ID NO: 160 - DNA, 98 bp, Mus musculus
  source 1..98: mol_type = genomic DNA
gaccctttggcgatctctgcctctctgggcctgtgtcttaggctcttcaagatccaacgagcaaagcacagggcctgcagagaggtagcgctctgctc

SEQ ID NO: 161 - DNA, 99 bp, Mus musculus
  source 1..99: mol_type = genomic DNA
catggcacctccgtttccctgaggagccctttgagcctggagtgaaaaaaaaaaacaggtcaagaggcgcctgggaactggagaagagtgttaaacttc

SEQ ID NO: 162 - DNA, 86 bp, Mus musculus
  source 1..86: mol_type = genomic DNA
aattgacttagctgggaagtggggaacccttccatgaggagtagaacactccttatgcaagattcccttctacctgactgagttga

SEQ ID NO: 163 - DNA, 96 bp, Mus musculus
  source 1..96: mol_type = genomic DNA
tgatattatgccatgacattgtgtcaatatgcgatgatgtgttgtgatggcacagcgtcatcacgtggtgacgcaacatcatgacgtaagacatca

SEQ ID NO: 164 - DNA, 92 bp, Mus musculus
  source 1..92: mol_type = genomic DNA
tcgggaggggcgggaggggggtccccggtgctcggatctcgagggtgcttattgttcggtccgagcctgggtctccctcttccccccatccc

SEQ ID NO: 165 - DNA, 77 bp, Mus musculus
  source 1..77: mol_type = genomic DNA
cagcagtaccaggagagagttagcgcattagtgcaatagttagtcctgatttctgggtttttctaatggctgctctt

SEQ ID NO: 166 - DNA, 1041 bp, Homo sapiens
  source 1..1041: mol_type = genomic DNA
atgccctcgcccctggccctacgcccctacctccggagcgagttttccccatcggtggacgcgcggccctgcagcagtccctcagagctacctgcgaagctgcttctgggggccactcttcctcgggccccgcggctgccgcgccggctggcctggtgctccattgactgggagcaggtgtgcttgctgcagaggctgggagctggagggtttggctcggtgtacaaggcgacttaccgcggtgttcctgtggccataaagcaagtgaacaagtgcaccaagaaccgactagcatctcggcggagtttctgggctgagctcaacgtagcaaggctgcgccacgataacatcgtgcgcgtggtggctgccagcacgcgcacgcccgcagggtccaatagcctagggaccatcatcatggagttcggtggcaacgtcactttacaccaagtcatctatggcgccgccggccaccctgagggggacgcaggggagcctcactgccgcactggaggacagttaagtttgggaaagtgtctcaagtactcactagatgttgtgaacggcctgctcttcctccactcgcaaagcattgtgcacttggacctgaagcccgcgaacatcttgatcagtgagcaggatgtctgtaaaattagtgacttcggttgctctgagaagttggaagatctgctgtgcttccagacaccctcttaccctctaggaggcacatacacccaccgcgccccggagctcctgaaaggagagggcgtgacgcctaaagccgacatttattcctttgccatcactctctggcaaatgactaccaagcaggcgccgtattcgggggagcggcagcacatactgtacgcggtggtggcctacgacctgcgcccgtccctctccgctgccgtcttcgaggactcgctccccgggcagcgccttggggacgtcatccagcgctgctggagacccagcgcggcgcagaggccgagcgcgcggctgcttttggtggatctcacctctttgaaagctgaactcggctga

SEQ ID NO: 167 - DNA, 2076 bp, Homo sapiens
  source 1..2076: mol_type = genomic DNA
atggctctccttttgacactaacatcaccagacctggagggtacctgggacaccagagacaaggatggcttcaaagcccaggaggggccgcccctggctgtacctgaatttcctgtgtgtggactgtaccggatctacggagtctgtggctctttcagctccttcttcatcatccggtgcagcctttgtgctctggagaccctcaaatcaccccaacatgatcccttagagatacctgaacagtccctcaaactcatacccctggtgtctgggaaaagggaactcacaaggggccagaaagctggagagaagcccctggctgcaggacccggggaggaggaactgctccggggctcagcccctcatgctcaggacactcagagtgaggaactgccaccctcctgcaccatctcaggagagaagaagccgccagcagtctctggagaagccaccggggctgatgctgggagactgtgcccgcccccccgctccagggctccccacaaagacagaactctagcccgctccaggccccagactcagggggaagattgttccctcccagtgggagaggtgaagataggaaagaggtcctattctccagcccccgggaagcagaaaaagcctaatgccatgggtctggccccaacatcatctccgggtgcccctaactcagcccgtgccacacacaacccagtgccctgtgggtcaggccgggggccctgccacctggccaatctcctcagtacattggcgcagagcaaccaaaacagagaccacaagcaggggcccccggaagtgacctgccaaattaggaaaaagacacgaaccctataccgctcagatcagctggaggagctagagaagatattccaagaagaccactatcctgacagtgataaacgccgagagattgcccagacggtgggggtgaccccccagcgcatcatggtaaagggggccggctcactggtggcagggtggagtggcggagggcccaccattgaaacactcgaattgcagagtgagcgctcagcggtagcctgggtgtggttccagaatcgccgggccaagtggcgaaaaatggagaaactgaatgggaaagaaagcaaggacaatcctgcagcccctggccctgccagcagtcaatgcagctctgcagctgagatcctacctgctgtgcccatggagccaaagcctgaccctttccctcaggagtcccctctggatacctttccagagccccccatgctgctgacttctgaccagactttggcccccacccaacccagtgagggtgctcagagggtggtgacccccccactcttcagccccccacctgtgcgaagggccgatcttcctttcccccttggccctgtccacaccccccaactgatgccactgctgatggatgttgctggcagtgacagcagccacaaggacggcccctgtgggtcctgggggacaagcatcaccctgccacccccctgttcatatttggaggagctggagccccaggattaccaacagagcaaccagccaggacccttccagttctcccaggctccacagcccccgcttttccagtcccctcagcccaagttgccctacctccccactttccccttctccatgcccagttcactgacgcttccaccgcccgaagactctctctttatgtttccctgtggccccagcgggggcacatcgcagggctattgcccaggtgcctcctcaggacagatcctgatgcaaccacctgctgggaatataggtacagcctcctggagtgacccctgtttgccagagctgcccttccctggtccgttctgcccacaagctctggggcatcccccaggaggggatggctactttcctgatctatttccaactccctgcccccaggctctgggcaggcagccttcgtcagctctctcatggatgcctgaaggggccagaccagggactgggcccttactcagcaaggcaaaagaggaaccaccagctgcttccctggatcagccctcagcactggaggaggccagaggggatgacaagaatagccatgtcccctag

SEQ ID NO: 168 - DNA, 2610 bp, Homo sapiens
  source 1..2610: mol_type = genomic DNA
tcctccgtgcaaaggaagctgctcccagcttctaacccacactactgatcttgccctcaattgacatcaagcaaaggagatatttaaagacaagctcgagtatcttcaattttacagatctagaattgtcaccataaagttagtgagcttaaagtgtgttgccccaaaaggatagaggaacctgctggccatgacatggctctccttttgacactaacatcaccagacctggagggtacctgggacaccagagacaaggatggcttcaaagcccaggaggggccgcccctggctgtacctgaatttcctgtgtgtggactgtaccggatctacggagtctgtggctctttcagctccttcttcatcatccggtgcagcctttgtgctctggagaccctcaaatcaccccaacatgatcccttagagatacctgaacagtccctcaaactcatacccctggtgtctgggaaaagggaactcacaaggggccagaaagctggagagaagcccctggctgcaggacccggggaggaggaactgctccggggctcagcccctcatgctcaggacactcagagtgaggaactgccaccctcctgcaccatctcaggagagaagaagccgccagcagtctctggagaagccaccggggctgatgctgggagactgtgcccgcccccccgctccagggctccccacaaagacagaactctagcccgctccaggccccagactcagggggaagattgttccctcccagtgggagaggtgaagataggaaagaggtcctattctccagcccccgggaagcagaaaaagcctaatgccatgggtctggccccaacatcatctccgggtgcccctaactcagcccgtgccacacacaacccagtgccctgtgggtcaggccgggggccctgccacctggccaatctcctcagtacattggcgcagagcaaccaaaacagagaccacaagcaggggcccccggaagtgacctgccaaattaggaaaaagacacgaaccctataccgctcagatcagctggaggagctagagaagatattccaagaagaccactatcctgacagtgataaacgccgagagattgcccagacggtgggggtgaccccccagcgcatcatggtgtggttccagaatcgccgggccaagtggcgaaaaatggagaaactgaatgggaaagaaagcaaggacaatcctgcagcccctggccctgccagcagtcaatgcagctctgcagctgagatcctacctgctgtgcccatggagccaaagcctgaccctttccctcaggagtcccctctggatacctttccagagccccccatgctgctgacttctgaccagactttggcccccacccaacccagtgagggtgctcagagggtggtgacccccccactcttcagccccccacctgtgcgaagggccgatcttcctttcccccttggccctgtccacaccccccaactgatgccactgctgatggatgttgctggcagtgacagcagccacaaggacggcccctgtgggtcctgggggacaagcatcaccctgccacccccctgttcatatttggaggagctggagccccaggattaccaacagagcaaccagccaggacccttccagttctcccaggctccacagcccccgcttttccagtcccctcagcccaagttgccctacctccccactttccccttctccatgcccagttcactgacgcttccaccgcccgaagactctctctttatgtttccctgtggccccagcgggggcacatcgcagggctattgcccaggtgcctcctcaggacagatcctgatgcaaccacctgctgggaatataggtacagcctcctggagtgacccctgtttgccagagctgcccttccctggtccgttctgcccacaagctctggggcatcccccaggaggggatggctactttcctgatctatttccaactccctgcccccaggctctgggcaggcagccttcgtcagctctctcatggatgcctgaaggggccagaccagggactgggcccttactcagcaaggcaaaagaggaaccaccagctgcttccctggatcagccctcagcactggaggaggccagaggggatgacaagaatagccatgtcccctagttggggggtcaaagagtgaaaagaggctgcttgggtgggataggattgggctcgctgagaggacaggggttgggggtttgggaaagagtgtggactctgtagactgaggggagagttagacgtttcccctgtgtaggctcgtcttgttgatatgagaaggaagaaagagggctggcgcttcccttttcttcacactctgtgtgggggtcctgaaggaagcaggtggcctgtgttacttctgaatgttgtatcaggtgtttttgtttgtttcctatccttgcttgacaaatgagctggagtgtccaccgtaagcagtaaactagtccgtcctgcggttttctctgtggttatgtgtctccattatgtgtctccacactcacactaatgaagagctccattttcgtccttttattccacttggctgagcagtcattg

SEQ ID NO: 169 - DNA, 5900 bp, Homo sapiens
  source 1..5900: mol_type = genomic DNA
gctgtcgctgtgtttgctttaacctgagtcttgttccttattgtggttcctgctgtggttttgatcatgttgttaccctcggacgtagcccggcttgtattgggttacttacagcaagaaaacctcatttctacctgccagacttttattttggaaagttcagatttaaaagaatatgcagaacattgtacagatgaagggtttattccagcctgcttactgtccttatttggaaaaaacttgacaacaattttaaatgagtatgtagctatgaaaacaaaagaaacatcaaataatgtcccagcaataatgtcatctctatggaagaaattggaccatacactttctcagatcaggagcatgcaaagttccccaaggtttgctggcagtcagagagcccgaacgagaactggaattgcagaaatcaaacggcagagaaagcttgcatctcaaacagctccagccagtgcagagttgctcactttaccttacctttcaggacagtttaccactcctccttccacaggtacacaggttactcgaccaagtggccaaatttcagatccatcgaggtcatattttgtagtggtcaaccactcacagtcacaagatactgtaaccactggagaagctttaaatgtcattcctggtgctcaggaaaagaaagcacatgccagtttaatgtctcccggtagacgcaaaagtgaatctcagagaaaaagtaccactttgtctggccctcattcaacaatacggaatttccaagatccaaacgcttttgcagtagaaaaacaaatggttattgaaaatgcacgagaaaaaatactaagcaacaaatctcttcaagaaaagctagcagaaaacataaataaatttttaactagtgataacaatattgcccaagtacctaagcaaacagataacaaccctacggagccagagacttcaattgatgaattcctaggacttccgagtgaaattcacatgtctgaagaagctatacaggacatattggaacagacagaatcagacccagcatttcaggcactctttgatctctttgactatggcaaaacaaagaataataaaaatatatcacaaagtatttccagtcaacctatggaatccaatcccagtatagtcttagcagatgaaactaatctagcagttaaaggttcttttgaaacagaagaatctgatggtcagtctggtcagcccgctttttgtacatcctatcagaatgatgacccattaaatgctttgaagaatagcaacaaccatgatgtgcttagacaagaagaccaggaaaatttttcccaaataagtaccagcatacagaaaaaggcctttaaaacagctgtacccactgaacagaagtgtgacattgacattacctttgagtccgtgcctaatttgaatgactttaaccaaagagggaattctaatgctgaatgtaatccacattgtgctgaattatacaccaatcagatgtccactgaaactgaaatggctatagggattgaaaagaactctttgtcttcaaatgtaccgagtgaatctcagttacagcctgatcagcctgatataccaataacttcatttgtttcacttggttgtgaagctaacaatgaaaacttaattctctctgggaagagttctcaacttttatcccaagatacttcattaactggaaagccatctaaaaaaagtcaattttgtgaaaattctaatgatacagtaaaacttaaaattaattttcatggttccaagtcatcagattctagtgaaattcacaagagtaaaatagaaattaatgtgttagaaccagttatgtcacagctatcaaattgccaagataattcttgtcttcaaagtgaaatactacctgtgtctgttgaaagttcacatttaaatgtatctggacaagtagaaattcatcttggagattcgctgtcttctactaaacaaccatctaatgattcagcatctgttgagttaaatcatacagaaaatgaagctcaggcatccaagtctgagaattcacaggagccttcatcttctgtaaaagaagagaatactatttttctctctttaggtggaaatgctaactgtgagaaagttgcactgacgcctccagaaggcactcctgtagaaaacagtcactctcttcctccagaatctgtgtgttcttcagtgggagattctcaccctgagtcccaaaatactgatgataaaccttctagcaacaactcagcagagatagatgcatcaaatatcgtctctctcaaagttatcattagtgatgatccatttgtttcctcagatactgaacttaccagtgctgtttctagtattaatggagaaaacctgccaactataatcttgtcttctcctactaaatcacctactaaaaatgcagaactagttaaatgcctatcttcagaagaaactgtaggtgctgttgtatatgccgaagtaggggattcagcctcaatggaacagagtcttttaacattcaaatctgaagactctgcagtaaacaatactcagaatgaagatggcattgctttttcagctaatgttacaccatgtgtttccaaggatggaggatatatacagttgatgccagccacaagcacagcttttggcaattcaaataacattctgatagctacctgtgtgactgatccaacagcgttaggaacatctgtaagtcagtctaatgtagtggtgttgcctggaaattctgcacctatgactgctcaacctctaccacctcagttacagacaccaccaaggtcaaacagtgtatttgctgtcaaccaagctgtgtcaccaaacttttcacaaggatctgccataataattgcctctccagtccagcctgtactccaaggaatggtagggatgatcccagtatctgtggttggacagaatggaaataacttttctactcctcctcggcaggttcttcatatgcctttgacagcacctgtatgcaatagaagtatccctcaattccccgtccctccaaaatctcagaaggctcagggactaagaaacaagccttgtataggaaaacaagtaaataatttggtggattcgtcaggtcattcagttggatgtcatgcacaaaaaactgaagtttctgacaaaagtattgccacagatcttgggaaaaaatcagaagaaaccacagttcccttcccagaagagagtatagttccagctgctaaaccatgccacagacgtgtactctgtttcgacagcactactgctcctgtggcaaatacgcaggggccaaaccataagatggtgtcccaaaacaaagaaaggaatgcagtctcttttcctaatcttgactcacccaatgtgtcctccaccttaaaacccccttctaataatgctatcaaaagagagaaagagaagcctcctctgcctaagattttatctaaatcggaaagtgccattagccggcataccaccataagagaaactcaatcagaaaagaaagtttcaccaacagaaattgtgcttgaatctttccataaagcaacagctaataaggagaatgaattatgcagcgatgtagaaagacagaaaaatccagaaaattcaaaactatctattgggcagcaaaatgggggtttgcgaagtgagaaatctatagcttcactgcaagaaatgaccaaaaaacaaggcacatcttcaaacaataaaaatgtactttcagtaggtacagctgtgaaggatctaaaacaagaacaaactaaatccgccagttctttgattaccacagaaatgttacaggatatacagaggcacagctcagtaagtaggcttgctgatagtagtgatttacctgtgccccggacacctggctcaggggcaggggaaaaacataaagaagaacctatagatattatcaaggccccctctagtaggcgtttcagtgaagacagtagtacatcaaaagtaatggtccctcctgtcaccccagacttgcctgcctgcagccctgccagtgaaacaggaagtgaaaacagtgtaaatatggctgcccacacattaatgattctctccagggcagccatttctaggactacttcagcaactcctctgaaagataacacacaacagtttagagcatcttcaaggagcaccacaaaaaagcggaaaattgaggaattagatgaacgtgagcgaaactctcgtccttctagtaaaaatcttacaaattcatcaataccaatgaaaaagaagaaaattaagaaaaagaagcttcccagttcatttccagcaggaatggatgtagacaaatttttgttatcattgcattatgatgagtaaacattctggacacataagacagtaggtgttaaaaactcatatcccttaaactgagtgtagggaatgggatattgacagaatctgaaagcatgacctgcactttcattgtactgaaacttcactttatatctaaatcatgctgtttctgaaacagcttcctagtttgtaaatagacttacttggtatatttttattttgggaaaaacgtttgcagaaatgtaagtaaagccaatctgcaaaactgtatagctttgacaattccatattgtaaatactgtgtaaatcttgttgaaatagaggttaaatcaacctaatgttcttacactgtgttttttgacttcttatgatccctaattctcgagacttactcatctggaatagtttctcacttgttttggaggaaaatgatgcttattcttataaattaccttcagtaactattcaataagacatttaaatacacaatcactaagtactacaaaataataaccacctcaactgatagcaaaatatctaattagaaatcaacagtttgatgagtttttttcctagagtgaattactacccctttcttataattgctgtaagtattatatttctggaatttcacactttacctactctgatcactctgttctctttgttttaaagagagaattttgtaaaccatttattgaatgttctgatctttcatttataacttaagattttttaacagaactttaagtggttagactattgagccataaaattttggtttgtagtagagatttctcggtatgtacttttcccctaaatgctggggatttaaagaattgcactaattcatagaactctttacattgtagtgaccaatgcacatataatttaaatcttgtgttctatgtgagagtttatgtggaggattatcttctggtgttgtgtccatcataagatgtaaaaagagaaatcatagttttatattttagtttctcctacaatgggtatgttaaataactatatctatacttagatatagtgcattgtctgtgtcccttaaagtgttacaaagagtttctctcaaaaggtccttaaggagagtgagagatgagagaggtgccttctctgtattagactcacacacatcagtccagttgaagaattggtttaaacttttaaatgagacagaaattataattagtacctgaccaattgtgcctagatattaaagtatgttctctttagtactttccgttcaattaaatatcagtatattagggatttttttctacaggtgtatattttgttgaagagtcactttcctcaaccatttttttgtactgggcctttaaaaaaataaatccatccaactttaacacaacatttctcagtgtagaaatcatgtcttcttaattgctgaaccttactgcaaaaacttgtgatgtaagaaatttgtatggtgtggcagtggtctattcctaaggaactaaatatcatatagttaatgtttatttaactcagcttgagactgtactacagttaggtttgaataaatattttcattaacttca

SEQ ID NO: 170 - DNA, 901 bp, Homo sapiens
  source 1..901: mol_type = genomic DNA
gttgcctaaacctctgccacccacctgtgaacttcactttgccacagggaggcactgaactgaaaaactgccttgtaagaggtgtcgcccctctgtctactccctttcttatatcaagaggggaaaaacacgtaactacctctacccgatctggtcaccatacgcctattacctttactgttacaagtaccggatcactctccgggagaagatgctgcctcgttgttataaaagcatcacttataaggaagaggaggacttgacactccagccccgttcctgcctccagtgctcctgagtccctagtaggcctccaggagggcaaaagcaccgagcagggtaaccacgaccagcttaaagaactgtattcggctgggaacttgacggtgctggctactgaccccctgctccaccaggacccagtacagttagactttcacttccgccttacctcccagacctctgcccattggcacggccttctctgtgaccgtcgactcttcctggatatcccatatcaggccttggatcaaggcaaccgggaaagtttgactgcaaccctggagtacgtggaagagaagacaaatgtggactctgtgtttgtgaacttccagaatgatcggaacgacagaggtgccctgctgcgggccttcagctacatgggctttgaggtggtcagaccagatcaccctgccctccctcccttggacaatgtcatctttatggtgtatccccttgaaagggatgttggccacctgcccagtgagcctccttgaacatgcttattccaacgctttgaggggctggaagccttgacacatggaatcaggggcccgggatgtgattcaggacactttccatcctaggaataaagggtagtgcaatcaaaaaaaaaaaaaaa

SEQ ID NO: 171 - DNA, 866 bp, Homo sapiens
  source 1..866: mol_type = genomic DNA
gcgcctcggcccgggccttactctccaccgactgcgtcaggatgagctccaggttttctttgggccgatgcttcgtgtcctccaccagcttatagacgcgatgtcgccggtgcaggcgcggcttccggccctccccggccagcggtaccttccaccagcgctccacgatgaccgtgccctggcggccaggaaagcgacgcatcacttataaggaagaggaggacttgacactccagccccgttcctgcctccagtgctcctgagtccctagtaggcctccaggagggcaaaagcaccgagcagggtaaccacgaccagcttaaagaactgtattcggctgggaacttgacggtgctggctactgaccccctgctccaccaggacccagtacagttagactttcacttccgccttacctcccagacctctgcccattggcacggccttctctgtgaccgtcgactcttcctggatatcccatatcaggccttggatcaaggcaaccgggaaagtttgactgcaaccctggagtacgtggaagagaagacaaatgtggactctgtgtttgtgaacttccagaatgatcggaacgacagaggtgccctgctgcgggccttcagctacatgggctttgaggtggtcagaccagatcaccctgccctccctcccttggacaatgtcatctttatggtgtatccccttgaaagggatgttggccacctgcccagtgagcctccttgaacatgcttattccaacgctttgaggggctggaagccttgacacatggaatcaggggcccgggatgtgattcaggacactttccatcctaggaataaagggtagtgcaatcaaaaaaaaaaaaaaa

SEQ ID NO: 172 - DNA, 753 bp, Homo sapiens
  source 1..753: mol_type = genomic DNA
gttcacaggcacagaatgagacctgagggaggaccccggcgtcggcggcaggaaaggcccccgccagtgctgcctgcggcgcgccgcatcacttataaggaagaggaggacttgacactccagccccgttcctgcctccagtgctcctgagtccctagtaggcctccaggagggcaaaagcaccgagcagggtaaccacgaccagcttaaagaactgtattcggctgggaacttgacggtgctggctactgaccccctgctccaccaggacccagtacagttagactttcacttccgccttacctcccagacctctgcccattggcacggccttctctgtgaccgtcgactcttcctggatatcccatatcaggccttggatcaaggcaaccgggaaagtttgactgcaaccctggagtacgtggaagagaagacaaatgtggactctgtgtttgtgaacttccagaatgatcggaacgacagaggtgccctgctgcgggccttcagctacatgggctttgaggtggtcagaccagatcaccctgccctccctcccttggacaatgtcatctttatggtgtatccccttgaaagggatgttggccacctgcccagtgagcctccttgaacatgcttattccaacgctttgaggggctggaagccttgacacatggaatcaggggcccgggatgtgattcaggacactttccatcctaggaataaagggtagtgcaatcaaaaaaaaaaaaaaa

SEQ ID NO: 173 - DNA, 1217 bp, Mus musculus
  source 1..1217: mol_type = genomic DNA
tgagtagaattaaaacagccagaggatttagcaagttacagcaaccctctggattcctggttatccagtacaggaacatactccaataaattcagaacacacaaatggcggaaggtccctccttgcatccaaaactccaagtggattcgaatatacccatagaaataagttcccaaatacctcaagaaccggcaaggaacctagcttttcaaatgcgtcagagtcccctagtgaccccaggaagtacaacgaaatcaagtctttcagtccctgaaaggaacctacttaagcaagagtctcaaggaccatcaagacaatcaggttgtatgctactgtcagataaatatgttaacaaacaaactggcccaatggcttcaagaaagtttcgaaaagaacgaactgtgtacaccaaagaacagcagggcctgctgcaaaaacattttgatgagtgccagtacccaaacaagaagaaaattgtggagctggcactatcagttggtgttacaaagagggagattaagatctggttcaagaacaaccgagctaagtacaggcggatgaacctccagaatattgaacaagtactgccagagtcaaatggaagctctaaagcggtttctgagtcaacccattttcctgttgttgcctctgacaatggagagtccatgtgttcaggcacatttggtgaggattccattcccaaattcaactgcagctaggaatcttccctgcattgttttcaggcctgagatggggccatgtgttgtacgcaagaatacgtgcttgatggccatacccctgttacagcttggaactctggtcaatcagcagcagttgaatatcacacttacttagcagtagctgaagctccagtcgggctggcatatgctgcccaagccccagaggatgctcacaattcagctccatctgcagacaagctctagcaaaggatccttgaagacttttgacacatcagatgactggcttgccatgagaaacccctccactccagcttacacctctcaggtccttgacgagtccaaccttacagccatgaagaagtgtgttatatacacctttattctctgtatttggagaaataaccagtcttatctgtagaagcatcataccactgtgttttatgtagtgcgattgtttgaaattcagtttaggtcttaattttttattgttagagtatatgttcattaaataaaagg

SEQ ID NO: 174 - DNA, 1343 bp, Mus musculus
  source 1..1343: mol_type = genomic DNA
tgagaattaaggatttgaatattgcaagtgggtggagccagcgtgaaggaggagcattgaattccaagtttgcagagatatataagggcaggtcttctgagtagaattaaaacagccagaggatttagcaagttacagcaaccctctggattcctggttatccagtacaggaacatactccaataaattcagaacacacaaatggcggaaggtccctccttgcatccaaaactccaagtggattcgaatatacccatagaaataagttcccaaatacctcaagaaccggcaaggaacttagcttttcaaatgcgtcagagtcccctagtgaccccaggaagtacaacgaaatcaagtctttcagtccctgaaaggaacctacttaagcaagagtctgaaggaccatcaagacaatcaggttgtatgccactgtcagataaatatgttaacaaacaaactagcccaatggcttcaagaaagtttcgaaaagaacgaactgtgtacaccaaagaagagcagggcctgctgcaaaaacattttgatgagtgcagtacccaaacaagaagaaaattgtggagctggcactatcagttggtgttacaaagagggagattaagatatggttcaagaacaaccgagctaagtacaggcagatgaacctccagaatattgaacaagcactgccagagtcaaatggaagctctaaagcggtttctgagtcaacccattttcctgttgttgcctctgacaatggagagtccatgtgttcaggcacatttggtgaggattccattcccaaattcaactgcagctaggaatcttccctgcattgttttcaggcctgagatggggccatgtgttgtacgcaagaatatgtgcttgatggccatacccctgttacagcttggaactctggtcaatcagcagcagttgaatatcacacttagcagtagctgaagctccagtcgggctggcatatgctgcccaagccccagaggatgctcacaattcaggtccatctgcagacaagctctggcaaaggatccttgaagacttttgacacatcagatgactgtcttgccatgagaaacccctccactccagcttacacctctcaggtccttgacgagtccaaccttacagccatgaagaagtgtgttatatacacctttattctctgtatttggagaaataaccagtcttatctgtagaagcatcataccactgtgttttatgtagtgcgattgtttgaaattcagtttaggtcttaattttttattgttagagtatatgttcattaaataaaaggagaaaatagtacttttaaaaaaaaaaaaaaaaaa

SEQ ID NO: 175 - DNA, 1603 bp, Mus musculus
  source 1..1603: mol_type = genomic DNA
aaaacagccagaggatttagcaagttacagcaaccgtctggattcctggcagaggtccaagtcctggattgtatagagaacccgacatcaaccaatggagaggcctgcttctaggacgaaggttctccagtacaggaacatactccaataagttctgaacacacacatggccgaaggcccctccttgcatccaaaactccaagtggcttcgaatatacccatagaactcagttcccaaatacctcaagaccctgcaaggaacttagcttttcaaatgtgtcagaatcccctaatgactccaggaagtacaatgcaatcaagactttcagtccctgaaaggaacctacttcagcaagagtctcaaggaccaacaagacaatcaggtcgtatgccactgtcagatagatatgttaacaaacaaactggccctatggctttaagaaagtttcgaaaagaacgcactgtgtactccaaagaacagcagtgcctgctgcaaaaacattttgatgagttccagtacccaaacgagaagaaaattgtggagctggcactatcagttggtgttacaaagagggagatcaagatctggttcaagaacaaccgagctaagtacaggcggatgaagctccagaatataaaacaagcactgccagagacaaatgaaagctctaaagcggtttctgagtcaacccattttcctggttccatacctgttgttgactcggacaatggagagtccatgtgttcaggcacatttggtgaggattccattcccaaactcaactgcagccaggaatcttccctgcattgttttcaggcctgtgatggggacatgtgttgtccgcaagaataccaagaataccaagaatacctgcttcatggccatgcccctgttacagcttggaactctggtcaatcagcagcatttgaatctcaaactgacttagcagtagctgaagttccagtcggcctggcatatgccgcccaagccccagaggatgctcacaattcaggtccatgtgaagatgagctctggcaaaggatccttgaagacttggacacatcagatgactggcttactctgagaaacctctccactccagtttacaccactgaggtccttgaccagtccaagccttacagccatgaagaagtgtgttatacacacctttagtgtcagtatttggagaaaattttattttacttttttattgggtatttatttcatttacatttccaatgctatcccaaaagacccccctaccctccccccttcccttcccacttcttggccctggcattcccctgtactgaggcagataaagtttgcacgaccaatgagtgtaatcactttgagagcacataattcggagtccattggtagaaaatgatactttgtttagtatatatttggggtggctgtggattcatgcaatatagggactcgctatcaagtctaactccagttatatgattacctacgccctctccttgcttcagaggtcactacatgcaacaggaaccctcatatacatgcagaacttgcaatcatatgatagaaaagcaatacatctgataaataaatactgtgagccaactcccc

SEQ ID NO: 176 - DNA, 1186 bp, Mus musculus
  source 1..1186: mol_type = genomic DNA
gttctccagtgcaggaacattctccaatcagttcagaacacatagatgtccaaagattcctccttgcatcctaaataccaaatggcttcaaatatacccagagaaaccagtttcctagtgcctaaagagcctacaaggtacttaccttttcaaatgtgtcagagtcctctagtgaccccaacacgtccactgcaatcaagtcattcagtccatgaaagggacctacatcagaaagactcccaagaaccatccagaaactcaggttctatgccactgtcagataaatattataacaaacaatctggccctgtggctacaagaaagtgtcgaaaggaacgcaccgtgtactccaaagaacaaaagtgtctgctgcaagaacattttcaccagtgccagaacccagacctggaacaacggaaggcactggcattactgattggtgtgacagaatacaagatccagacctggttcaagaacagacgagctaaagaatgtcggaagagttcacaactccctcggagaattggaagtggacctcactataggcctacttccagcagtggcggtgaagttcctgatttcgctgccagtccagattctgtgtgccagagacatgtgaatgtcagctatcctcctgagtttagaccatcaaggaactcccctcaccaggaattcaactcttccctcattgatcaacccttggaagacatgtgtttcagcaagagccacattatctcggagcatccaaggcagaagtgtagagaactttccagggaaccggggcacctatctagtgataggtctggctgttccaacgttctttcctcaccttctccagcagccggtgctgaatcttcgtgtgacataccctcgggattaagcctttctcctcaactcggacctccaagtatgacccaaaactcagaatccaccttctccatgtgccagacaccatcagttttgagccctcttcctgaactcagccccttgagtaattccctagaccagatggccatcttttccaaaattgatcaggtctgtgaaatctatcaaaagaatacaaggtctaagaagcaaaggaaggagacagagaagaacacggtgcaaaatttgatgcatggccaggattcctgtgaaataactgaaagccctaaaggcactgtctctctgccaagctctgcctatc

SEQ ID NO: 177 - DNA, 1336 bp, Mus musculus
  source 1..1336: mol_type = genomic DNA
agaagtcaaacagaggattgggcaaactatagcaaccctctgatttcaggttctcctgtaggaacatgcttcaatacaatcagagcccacatatgccccaagatccctccttgcattcaaaattccaaatgtcttcaagtgcacccatagaaatcagttttcaaatgcatcaagaacctgcaaggaatttgcctttccaaatgtgccagagtcctctagtgatcccaagaagtccaatgcaatcaagtcattcagtccctgaaagggacctatgtccgcaagagtcccaaggtccatcaggaaaatcaagtatacaaatgcaaccaggtcttgtaatggacccagctttaccaattctgagaagcctcttaatgcattcacctcatcagataccttcaagatcctcagtgagagctggtttccagggttctctaggacctatggtgcggtcacctagttatggtgaccgacgagtcagccttgtgactccaaggaagcaccggaaaatacgcactgtatacaccgaggaacaaaagtgtgtgctgaaaaaacattttcataagtgcacatacccaagccgggagcaacgcatggcactggcagttttggttggtgtcacagcaaatgagatccagatctggttcaagaaccaccgggctaagtccaagcgggagagtctccagaatgttccagcagcactgccagagacaaatggaagctctgaagctgtttctgagtcagtccactttcctgattccttacccgttgttgcttctgccaatggagagtccatgtggtcaggcacatttggtgaggattccattcccaacctcaactggagccaggaatcttctccgcctcattatcaggcctgtgatagtgccaggtattgtccgcaagaatacctgcttaatggccatgcccctgttacagcttggaactctggtcaatcagtagcagttgaagtccagactggcttagcagtagctgaagctccagtcgtcatggtagcttccacccaaggtccagagtatgctcaagattcaggtccatctacagaggagctctggcaacgggttcttgaagactttgatgagttgggggattgagatacacccccataaaacacctctcaccccccttgacttatccaggcctttatagaaaggaagatgtttgttagtgtatttggagaaattaagtaggtctatctgtagtagtttcatgtcactggtttatgtagtgggattgtttaaaaaacatggaaaatattcctcccttattgttgaattacatattctttaaataaaagaaagaaaacatttactggagaatt

SEQ ID NO: 178 - DNA, 1409 bp, Homo sapiens
  source 1..1409: mol_type = genomic DNA
gagtagtcccttcgcaagccctcatttcaccaggcccccggcttggggcgccttccttccccatggcgggacacctggcttcggatttcgccttctcgccccctccaggtggtggaggtgatgggccaggggggccggagccgggctgggttgatcctcggacctggctaagcttccaaggccctcctggagggccaggaatcgggccgggggttgggccaggctctgaggtgtgggggattcccccatgccccccgccgtatgagttctgtggggggatggcgtactgtgggccccaggttggagtggggctagtgccccaaggcggcttggagacctctcagcctgagggcgaagcaggagtcggggtggagagcaactccgatggggcctccccggagccctgcaccgtcacccctggtgccgtgaagctggagaaggagaagctggagcaaaacccggaggagtcccaggacatcaaagctctgcagaaagaactcgagcaatttgccaagctcctgaagcagaagaggatcaccctgggatatacacaggccgatgtggggctcaccctgggggttctatttgggaaggtattcagccaaacgaccatctgccgctttgaggctctgcagcttagcttcaagaacatgtgtaagctgcggcccttgctgcagaagtgggtggaggaagctgacaacaatgaaaatcttcaggagatatgcaaagcagaaaccctcgtgcaggcccgaaagagaaagcgaaccagtatcgagaaccgagtgagaggcaacctggagaatttgttcctgcagtgcccgaaacccacactgcagcagatcagccacatcgcccagcagcttgggctcgagaaggatgtggtccgagtgtggttctgtaaccggcgccagaagggcaagcgatcaagcagcgactatgcacaacgagaggattttgaggctgctgggtctcctttctcagggggaccagtgtcctttcctctggccccagggccccattttggtaccccaggctatgggagccctcacttcactgcactgtactcctcggtccctttccctgagggggaagcctttccccctgtctccgtcaccactctgggctctcccatgcattcaaactgaggtgcctgcccttctaggaatgggggacagggggaggggaggagctagggaaagaaaacctggagtttgtgccagggtttttgggattaagttcttcattcactaaggaaggaattgggaacacaaagggtgggggcaggggagtttggggcaactggttggagggaaggtgaagttcaatgatgctcttgattttaatcccacatcatgtatcacttttttcttaaataaagaagcctgggacacagtagatagacacactta

SEQ ID NO: 179 - DNA, 2075 bp, Homo sapiens
  source 1..2075: mol_type = genomic DNA
ggaaaaaaggaaagtgcacttggaagagatccaagtgggcaacttgaagaacaagtgccaaatagcacttctgtcatgctggatgtcagggctctttgtccactttgtatagccgctggcttatagaaggtgctcgataaatctcttgaatttaaaaatcaattaggatgcctctatagtgaaaaagatacagtaaagatgagggataatcaatttaaaaaatgagtaagtacacacaaagcactttatccattcttatgacacctgttacttttttgctgtgtttgtgtgtatgcatgccatgttatagtttgtgggaccctcaaagcaagctggggagagtatatactgaatttagcttctgagacatgatgctcttcctttttaattaacccagaacttagcagcttatctatttctctaatctcaaaacatccttaaactgggggtgatacttgagtgagagaattttgcaggtattaaatgaactatcttcttttttttttttctttgagacagagtcttgctctgtcacccaggctggagtgcagtggcgtgatctcagctcactgcaacctccgcctcccgggttcaagtgattctcctgcctcagcctcctgagtagctgggattacaggtgcgtgccaccgtgcccagctaatttttgtgtttttagtagagacggggtttcaccatgttggccatgctggtcttgaactcctgacctcgtgatctgcccacctcggcctcccaaagtgctggaattataggcgtgagccaccgcgcccagcaaagaacttctaaccttcataacctgacaggtgttctcgaggccagggtctctctttctgtcctttcacgatgctctgcatcccttggatgtgccagtttctgggggaagagtagtcctttgttacatgcatgagtcagtgaacagggaatgggtgaatgacatttgtgggtaggttatttctagaagttaggtgggcagcttggaaggcagaggcacttctacagactattccttggggccacacgtaggttcttgaatcccgaatggaaaggggagattgataactggtgtgtttatgttcttacaagtcttctgccttttaaaatccagtcccaggacatcaaagctctgcagaaagaactcgagcaatttgccaagctcctgaagcagaagaggatcaccctgggatatacacaggccgatgtggggctcaccctgggggttctatttgggaaggtattcagccaaacgaccatctgccgctttgaggctctgcagcttagcttcaagaacatgtgtaagctgcggcccttgctgcagaagtgggtggaggaagctgacaacaatgaaaatcttcaggagatatgcaaagcagaaaccctcgtgcaggcccgaaagagaaagcgaaccagtatcgagaaccgagtgagaggcaacctggagaatttgttcctgcagtgcccgaaacccacactgcagcagatcagccacatcgcccagcagcttgggctcgagaaggatgtggtccgagtgtggttctgtaaccggcgccagaagggcaagcgatcaagcagcgactatgcacaacgagaggattttgaggctgctgggtctcctttctcagggggaccagtgtcctttcctctggccccagggccccattttggtaccccaggctatgggagccctcacttcactgcactgtactcctcggtccctttccctgagggggaagcctttccccctgtctccgtcaccactctgggctctcccatgcattcaaactgaggtgcctgcccttctaggaatgggggacagggggaggggaggagctagggaaagaaaacctggagtttgtgccagggtttttgggattaagttcttcattcactaaggaaggaattgggaacacaaagggtgggggcaggggagtttggggcaactggttggagggaaggtgaagttcaatgatgctcttgattttaatcccacatcatgtatcacttttttcttaaataaagaagcctgggacacagtagatagacacacttaaaaaaaaaaa

SEQ ID NO: 180 - DNA, 1589 bp, Homo sapiens
  source 1..1589: mol_type = genomic DNA
ggaaaaaaggaaagtgcacttggaagagatccaagtgggcaacttgaagaacaagtgccaaatagcacttctgtcatgctggatgtcagggctctttgtccactttgtatagccgctggcttatagaaggtgctcgataaatctcttgaatttaaaaatcaattaggatgcctctatagtgaaaaagatacagtaaagatgagggataatcaatttaaaaaatgagtaagtacacacaaagcactttatccattcttatgacacctgttacttttttgctgtgtttgtgtgtatgcatgccatgttatagtttgtgggaccctcaaagcaagctggggagagtatatactgaatttagcttctgagacatgatgctcttcctttttaattaacccagaacttagcagcttatctatttctctaatctcaaaacatccttaaactgggggtgatacttgagtgagagaattttgcaggtattaaatgaactatcttcttttttttttttctttgagacagagtcttgctctgtcacccaggctggagtgcagtggcgtgatctcagctcactgcaacctccgcctcccgggttcaagtgattctcctgcctcagcctcctgagtagctgggattacagtcccaggacatcaaagctctgcagaaagaactcgagcaatttgccaagctcctgaagcagaagaggatcaccctgggatatacacaggccgatgtggggctcaccctgggggttctatttgggaaggtattcagccaaacgaccatctgccgctttgaggctctgcagcttagcttcaagaacatgtgtaagctgcggcccttgctgcagaagtgggtggaggaagctgacaacaatgaaaatcttcaggagatatgcaaagcagaaaccctcgtgcaggcccgaaagagaaagcgaaccagtatcgagaaccgagtgagaggcaacctggagaatttgttcctgcagtgcccgaaacccacactgcagcagatcagccacatcgcccagcagcttgggctcgagaaggatgtggtccgagtgtggttctgtaaccggcgccagaagggcaagcgatcaagcagcgactatgcacaacgagaggattttgaggctgctgggtctcctttctcagggggaccagtgtcctttcctctggccccagggccccattttggtaccccaggctatgggagccctcacttcactgcactgtactcctcggtccctttccctgagggggaagcctttccccctgtctccgtcaccactctgggctctcccatgcattcaaactgaggtgcctgcccttctaggaatgggggacagggggaggggaggagctagggaaagaaaacctggagtttgtgccagggtttttgggattaagttcttcattcactaaggaaggaattgggaacacaaagggtgggggcaggggagtttggggcaactggttggagggaaggtgaagttcaatgatgctcttgattttaatcccacatcatgtatcacttttttcttaaataaagaagcctgggacacagtagatagacacacttaaaaaaaaaaa

SEQ ID NO: 181 - DNA, 1840 bp, Mus musculus
  source 1..1840: mol_type = genomic DNA
gattcatagcaaggagaggaagtatagattaggtctcttggagcctggagtcacagctttcccttgcccgaatatggtgatctgtctccattgtccagatcaggatgattctttagaagaagtcacagaggaatgctattccccacccaccctccagaacctggcaattcagagtctactgagggatgaggccttggccatttctgctctcacggacctgccccagagtctgttcccagtaatttttgaggaggccttcactgatggatatatagggatcttgaaggccatgatacctgtgtggcccttcccatacctttctttaggaaagcagataaataattgcaacctggagactttgaaggctatgcttgagggactagatatactgcttgcacaaaaggttcaaaccagtaggtgcaaactcagagtaattaattggagagaagatgacttgaagatatgggctggatcccatgaaggtgaaggcttaccagatttcaggacagagaagcagccaattgagaacagtgctggctgtgaggtgaagaaagaattgaaggtgacgactgaagtccttcgcatgaagggcagacttgatgaatctaccacatacttgttgcagtgggcccagcagagaaaagattctattcatctattctgtagaaagctactaattgaaggcttaaccaaagcctcagtgatagaaatcttcaaaactgtacacgcagactgtatacaggagcttatcctaagatgtatctgcatagaagagttggcttttcttaatccctacctgaaactgatgaaaagtcttttcacactcacactagatcacatcataggtaccttcagtttgggtgattctgaaaagcttgatgaggagacaatattcagcttgatttctcaacttcccacactccactgtctccagaaactctatgtaaatgatgtcccttttataaaaggcaacctgaaagaatacctcaggtgcctgaaaaagcccttggagacactttgcatcagtaactgtgacctctcacagtcagacttggattgcctgccctattgcctgaatatttgtgaactcaaacatctgcatattagtgatatatatttatgtgatttactccttgagcctcttggttttctccttgagagagttggagataccctgaaaaccctggaattggattcatgttgtatagtggactttcagttcagtgccttgctgcctgccctaagccaatgttctcacctcagagaggtcactttctatgataatgatgtttctctgcctttcttgaaacaacttctacaccacacagccctgctgagtcagctgatctatgagtgttaccctgcccctctagagtgctatgatgacagtggtgtaatactaacacacagattagaaagtttttgtcctgagcttctggatatactgagagccaaaagacagctccatagtgtctcctttcaaacaaccaaatgctctaaatgtggtgggtgctacatttatgatcggcatacccaatgttgccgttttgtggaactactataagcttgattgtgaaactgagaaatagaaacttagtattggggactgatgaaatcctaagtgaatgtccactgctaaatggagcatgaaaatgtcaatcacctaaaagtctgagatacacaggaaagtcaataacttcctctgagctggtgaatggatgttgcatctgtagaaagtatcaagcacttgtagtttgaatgtgttacaatagaagcaccattttatgagactggcccaatctgttgactgcatacaataaatctgttgactttttaaaaa

SEQ ID NO: 182 - DNA, 1929 bp, Mus musculus
  source 1..1929: mol_type = genomic DNA
tcagtttttgaaaccaggagttgcagctttcccctgcctgaatatggtgatgtgtaaccattgtccagatcaaggactggagaattaaacacagtctcttcatcatccaacacctgactgaggcttcagagtttctgcatgactctttagaagaagacacaatgaatttctattcgccacccactctgatggagctagcaagacagtgtctactgagggatgagtacttggccatttctgctctcaaggacctgcccaatatgatgttcccagtgatgtttaaggaggcatttattgatggacatacaaagatcttgactgccatgatacctgtgtggcccttcccatacctttctgtaggaacgatgctaaagaacctcaacttagacactttgaaggctgttcttgaggagatagatatactgatttcaaaaccagttttttccagtaggtgcaaactcagagagatcactttgagccatgatttggttgtggtatgggctggatcccatgaagttgaaggcttaccagagttcatggaacaggagaagccagttgagaatagtcctggctatgggacaaagaacaaattgaaagtgacaacagaactccaattcatggagggccaccttgatgaatgttccacttacttgttgcagtgggcctaccagagagaagattccattcatctacactgtagaaagctgaaaatttatggcttaaccaaagccgcagtcatagaaatgttcaaaattgtacatgcagaatatatagaagatctggaactatcttgtctttgcctagaatatttggattttcttaatccctatctgaaacagatgagcaatctactctcactcacactagatgagatcatatataccctcaatatagatgattatagaaatcttaatgaggaaaaagtgattacagtgatttctcatcttcctacattccaccatctccaggaactctatgtacatggtgtcatttttatagaatgtctcaggtgcctgaagaagcccttggaagtactttcgttcactgactgtgacctctcacagtcagacttggattacctcccctattgcctgaatatttttgagctcagatctctccacctgactgatgtacgtttaagtaatttacttcttgagccccttgggtttctccttgagagagttagacataccctgaaatccctgcaattaatgtcatgtgaaatgggggaaactcacttcaatgccctgctgcctgccctaagtcaatgttaccagctcacagtagttaatttctatggtaatgaactctctctgcttttcctgaaaaaacttctacaccacacagctaagcttagccagctagctgatgagctataccctgcccctcaggagtgctatgataatagggatgtagtactatcacacagattagaaaatttttgttctgagctcctggatatactcagggccataagagagcccaagaaagtcacctttggtacaatcaaatgctccaagtgtggtgggtcctatgtttatgatctggagacccaatgttgcttttttgaaaagaaccctccctgggcttgattttggaagagagaaatggtagcgtactattgggaattgatatcctaagtgaatgtcccttgctggaaggaacatagatgtgtcaaccacctaattttctgagacacattgaaaagaaataattgtcctcagagctggtgaagagtattgcatctacaaaagatgttaagcactattttattctctaggattattgtagtttgtgtgtgttacaatacaggcatccttgcatgaaaatgttgttcccatctgttgactgcatacaataaatgtgttgactttctggggtgctggtatgtctcaatcagagcacagagcctaatcattcccagcatct

SEQ ID NO: 183 - DNA, 1868 bp, Mus musculus
  source 1..1868: mol_type = genomic DNA
cttgggttcttggaggttggaatcatagcctacctcagtctgactatgatgatctgtcaccagtgtctagatcaagatgactcttcagaagaagaagaagcagttagtgtctactccccatccaccctggtgaaactggcaagacagaggctactgagggaggaggctttggtcatttctgctctcaagggcctgccaaatatgctgttcccagtgatatttgaggaggccttcattaatggtcatacaaagatcttgaaggccatgatacctatgtggcccttcccatacctttctgtaggagcactgacaaacaactgcaacctgaagactttgaaggctgttcttgatggactagatatacttcttgcacaaaaggttcgctccagtaggtgcaaactcagagtactcaaatggagagatgaacagcatgacttttgtgggatatggcctggatcccatgaagctgaagacttaccagagttaatgacacagaagcatcccgtgcagaacaaccctgactgtggggtaaagaaagaattgagggtaacaactgaactctctgtcatgaagggcagacttgatgattctgccacatacttgttggagtgggcccagcagagaaaagattccattcacctactctgcagaaagctggtaattgaaaccttaaccaaagacacagtgatagaaatcttcaaaattgtaaatgcagattgtatacaggagctggagctgtattctctttgcctagaagatttggcttttcttaatccctacctgagacagatggacaatcttcttgaactcacacttgatcacgtcacagattccctcagtatgggtgattctgaaatgtgtgaggaagaaatgatcacattggtttctcaacttcccacatttccctgtctccagaaactctgtgtaaatgatgtctactttatatatggcaacctgaatgaaatcctcaggtgcctgaagaagccattggtatcattttgcatcagtaactgtgaactctcacagtcagacttggattgcctgccctattgcctgaatatttttgagctaaaatgtttgtaccttattgatatacctttaaatcatttatgccttgatcctctcgggtttctccttgagagtgttagacataccctggaatgcttggaattaaagtcatgtgatatgggggaacctcaattcaatgccctgctgcctgccctaagtcaatgttcccacctcacagatgtcagtttttgggaaaatgaactctctctgctgttcctgaaacaacttctacagcacacatccaagctgactcagctgagctatgagctgtaccctgcccctcttgagtgctatgatgacaggggtttaatactatcacacagattagaacaattttgtcccgaactcctggatatactcagggccaaaagacagcccaaggatattgcctttgttacaaacccatgttctaaatgtggtagatactatgtttatgatccaaagacccaacgtttctctttggaagacacaaccctgtaaggttgattgtggaacagagaaatgcaagcttagtattggggatcgatgaaatcttagttgaatttcccttggttaaaggaacatggatttgtcaatcatgtaaaggtctgagataaacaataaaaatgcaagatattcctctgagctagtgaatgaatgtaccatctgcaagaagtgtcaagcatgcttttattctctaggattattgtagattgagtatgttacaatagaggcaaacttccatgaggatattgttctcctttgttgactgcatataataaatgtgttaactttgttttatttttaaaaaaaaaaaaaaa

SEQ ID NO: 184 - DNA, 1853 bp, Mus musculus
  source 1..1853: mol_type = genomic DNA
ggtctcttggagcctggagacacagccttcccctgcctgaatatggcgagctgtgaagagtgtccacctcaaaatgtatctttcgaagaagacattgtgaatatcaaccccccacccgccctccagaacctggcaattcagagtctactgagggatgaggccttggccatttctgctctcaagaacctaccccagaatctgttcccagcaatttttgaagcagccgtaattggtggacgtatagagatcttgaaggccatgatacctgtatggcccttcccatacctttctttaggaaagctgataaagaattgcaacctggagactttgaaggctatgcttgagggagtggatatactgcttgcacaaaatgatcgctccagtagatgcaaactcagagtgctcgatttaaggaatgaataccatactttgtggagaatatggggtggatcctatgaaggtagaggcttgccagagttcatgacacagcagcagccaatggagaactgtcctgactgtggggtgaataaagaattgaaggtgacaactgacctcaacctcgtggatggtggacttgatgaatctgccacatacttgttgcagtgggcccagcagaaaaaagattccattcatctatgctgtacgatgttgagaattcatagcttacccaaagacatattcagagatatcctcaaaattgtaaatacaggctgtatacaggagcttcacttgaaggaattgtacacagaagagttggtttttcttataccttacctgagagaaatgaacaatcttcttacattcatgctaagtagcatcagagaaacctgcagaatggataactcgacaaggcttgatgaagagaatataagcaggtttatttctcgccttcccaaattccactgtctgcagaatctctatgtaaatgatatcacccttctaggaaacaacctgaaagacttcctcaggtgcctggggaagcccttggagactctttgcctcacttcttgtgacttatcacagtcagacttggattacctgccctgttgccagaatacttctgcactcaaacgtctgaacctgactgctacaagtttgcgtggtttagtctttcatcctcttggagttctccttgagagtgttagaggtacactgcaatccctggaattagagttgtgttttatggaggactctcagatcagtgccattttgcctgccctaagccaatgttcccatctcacaaaggtcaatttctatgataatgaactctctctgcctatcctgagacaacttctataccacacagccaacctgagccagctgacctatgaggtataccctgcccctctagagtgctataatgacatgaatataatactaacacataagttagaaaatttttgtcctgagcttctggacataatcagggccaataggcagcccaacagagtcacatttgctacatccaaatgtttaatctgttgtgggtcctacgtttatgatctggagacccagagctgcctataccagaaagatctactggaagattgattgtggaacaaagaaatggaagctgagtattagaaatggacaaaattgtaagtcgatgtcaattgctgataggagcatggttatgtcaagcacctaaatgtctgacacacattggaaaggcaagatcttcctctgagcaagagaatggatgttgcatctgcaaaaagtgccaagcactcttttcttctcttgtactattgtagtttgagtgtgtcataataggggcacccttctatgagaagattgtccccctttattaagtgcatacaataaatgtgttaactttcaaaaaaaaaaaaaaa

SEQ ID NO: 185 - DNA, 1996 bp, Mus musculus
  source 1..1996: mol_type = genomic DNA
ggtctcttggagcctggagacacagccttcccctgcctgaatatggcgagctgtgaagagtgtccacctcaaggcctggagagctaagcacagtctagtcatcatcaatcggctaactgagcctttagggttcctggtgatccctttccagtgggatatattcaccccaactgtgactgcaattggatgtggccttcgggaactaggatactttgaatgtatctttcgaagaagacattgtgaatatcaaccccccacccgccctccagaacctggcaattcagagtctactgagggatgaggccttggccatttctgctctcaagaacctaccccagaatctgttcccagcaatttttgaagcagccgtaattggtggacgtatagagatcttgaaggccatgatacctgtatggcccttcccatacctttctttaggaaagctgataaagaattgcaacctggagactttgaaggctatgcttgagggagtggatatactgcttgcacaaaatgatcgctccagtagatgcaaactcagagtgctcgatttaaggaatgaataccatactttgtggagaatatggggtggatcctatgaaggtagaggcttgccagagttcatgacacagcagcagccaatggagaactgtcctgactgtggggtgaataaagaattgaaggtgacaactgacctcaacctcgtggatggtggacttgatgaatctgccacatacttgttgcagtgggcccagcagaaaaaagattccattcatctatgctgtacgatgttgagaattcatagcttacccaaagacatattcagagatatcctcaaaattgtaaatacaggctgtatacaggagcttcacttgaaggaattgtacacagaagagttggtttttcttataccttacctgagagaaatgaacaatcttcttacattcatgctaagtagcatcagagaaacctgcagaatggataactcgacaaggcttgatgaagagaatataagcaggtttatttctcgccttcccaaattccactgtctgcagaatctctatgtaaatgatatcacccttctaggaaacaacctgaaagacttcctcaggtgcctggggaagcccttggagactctttgcctcacttcttgtgacttatcacagtcagacttggattacctgccctgttgccagaatacttctgcactcaaacgtctgaacctgactgctacaagtttgcgtggtttagtctttcatcctcttggagttctccttgagagtgttagaggtacactgcaatccctggaattagagttgtgttttatggaggactctcagatcagtgccattttgcctgccctaagccaatgttcccatctcacaaaggtcaatttctatgataatgaactctctctgcctatcctgagacaacttctataccacacagccaacctgagccagctgacctatgaggtataccctgcccctctagagtgctataatgacatgaatataatactaacacataagttagaaaatttttgtcctgagcttctggacataatcagggccaataggcagcccaacagagtcacatttgctacatccaaatgtttaatctgttgtgggtcctacgtttatgatctggagacccagagctgcctataccagaaagatctactggaagattgattgtggaacaaagaaatggaagctgagtattagaaatggacaaaattgtaagtcgatgtcaattgctgataggagcatggttatgtcaagcacctaaatgtctgacacacattggaaaggcaagatcttcctctgagcaagagaatggatgttgcatctgcaaaaagtgccaagcactcttttcttctcttgtactattgtagtttgagtgtgtcataataggggcacccttctatgagaagattgtccccctttattaagtgcatacaataaatgtgttaactttcaaaaaaaaaaaaaaa

SEQ ID NO: 186 - DNA, 2219 bp, Homo sapiens
  source 1..2219: mol_type = genomic DNA
aaatctccctgagagcgggaccggcctcagctccaacacagcctccactgtgattaaaaataaaaattgctagagcagccctcactcgccacatctactttgatagctggctatttggaatttaaaggatatttgactttttctaacctcccatgaggctgtaagttccactgctccaaacccacccaccaaggactctgaacctgtccaccccgggcgcatcaagatcttccagctgggtacccccgatttgggccgactttgcacctccaaacaaccttagcatgatgtcttatcttaagcaaccgccttacgcagtcaatgggctgagtctgaccacttcgggtatggacttgctgcacccctccgtgggctacccggggccctgggcttcttgtcccgcagccaccccccggaaacagcgccgggagaggacgacgttcactcgggcgcagctagatgtgctggaagcactgtttgccaagacccggtacccagacatcttcatgcgagaggaggtggcactgaaaatcaacttgcccgagtcgagggtgcaggtatggtttaagaatcgaagagctaagtgccgccaacaacagcaacaacagcagaatggaggtcaaaacaaagtgagacctgccaaaaagaagacatctccagctcgggaagtgagttcagagagtggaacaagtggccaattcactcccccctctagcacctcagtcccgaccattgccagcagcagtgctcctgtgtctatctggagcccagcttccatctccccactgtcagatcccttgtccacctcctcttcctgcatgcagaggtcctatcccatgacctatactcaggcttcaggttatagtcaaggatatgctggctcaacttcctactttgggggcatggactgtggatcatatttgacccctatgcatcaccagcttcccggaccaggggccacactcagtcccatgggtaccaatgcagtcaccagccatctcaatcagtccccagcttctctttccacccagggatatggagcttcaagcttgggttttaactcaaccactgattgcttggattataaggaccaaactgcctcctggaagcttaacttcaatgctgactgcttggattataaagatcagacatcctcgtggaaattccaggttttgtgaagacctgtagaacctctttttgtgggtgatttttaaatatactgggctggacattccagttttagccaggcattggttaaaagagttagatgggatgatgctcagactcatctgatcaaagttccgagaggcatagaaggaaaaacgaagggccttagaggggcctacaaaccagcaacatgaaatggacaaaccaatctgcttaagatcctgtcatagttttagatcattggttatcctgatttgcaaagtgatcaaaagcattctagccatgtgcaaccaaacaccaccaaaaataaaatcaaacaaaactaagttgtgaaggaagggagggaaggtcatagccttcttaagcagaggtgttccattgttttagccaatccttggttgaatcttaggaatgaacagtgtctcaagctcattcacgtttcatgaccaactggtagttggcactgaaaaaacttttcagggctgtgtgaattgtgtgactgattgtcctagatgcactactttatttaaaaaataatgttcataaggagtcaatatgtagtttaagagacaatcagtgtgtgtcttataaatggtacatctgtggtttttaatctgtgctagacttcaaaactgtgatctcctgttattgtatgcaaccttgaactccacctctgcaggggttcttctgtgattaaataggttataattataagcaaaattcagagcaactgagtactgatctaaaaagattacctttggctggaggtgagctgcactgaaactttacgacaaaatgtctctggacaaagagagtcagagaagagaagcaaaaggacactaattcatctgtaatttactgttggtaagcctagcagtaaagagacattggtcaattgctctgaccctgatgaattattaaactgagatcattgtcgtttatgcttgcagatgttaaatggaaaagttatatatgcataaaccttttcttcctggatttggcagatatgtataattatattaaaatggttctagcacaaaaaaaaaaaaaaa

SEQ ID NO: 187 - DNA, 2118 bp, Homo sapiens
  source 1..2118: mol_type = genomic DNA
tttttaagttagtgctggaacgtggaagagctgctgcctccgaagcagtaaaccagcccctctgtttgtttgtttgctttgcccttagttccactgctccaaacccacccaccaaggactctgaacctgtccaccccgggcgcatcaagatcttccagctgggtacccccgatttgggccgactttgcacctccaaacaaccttagcatgatgtcttatcttaagcaaccgccttacgcagtcaatgggctgagtctgaccacttcgggtatggacttgctgcacccctccgtgggctacccggccaccccccggaaacagcgccgggagaggacgacgttcactcgggcgcagctagatgtgctggaagcactgtttgccaagacccggtacccagacatcttcatgcgagaggaggtggcactgaaaatcaacttgcccgagtcgagggtgcaggtatggtttaagaatcgaagagctaagtgccgccaacaacagcaacaacagcagaatggaggtcaaaacaaagtgagacctgccaaaaagaagacatctccagctcgggaagtgagttcagagagtggaacaagtggccaattcactcccccctctagcacctcagtcccgaccattgccagcagcagtgctcctgtgtctatctggagcccagcttccatctccccactgtcagatcccttgtccacctcctcttcctgcatgcagaggtcctatcccatgacctatactcaggcttcaggttatagtcaaggatatgctggctcaacttcctactttgggggcatggactgtggatcatatttgacccctatgcatcaccagcttcccggaccaggggccacactcagtcccatgggtaccaatgcagtcaccagccatctcaatcagtccccagcttctctttccacccagggatatggagcttcaagcttgggttttaactcaaccactgattgcttggattataaggaccaaactgcctcctggaagcttaacttcaatgctgactgcttggattataaagatcagacatcctcgtggaaattccaggttttgtgaagacctgtagaacctctttttgtgggtgatttttaaatatactgggctggacattccagttttagccaggcattggttaaaagagttagatgggatgatgctcagactcatctgatcaaagttccgagaggcatagaaggaaaaacgaagggccttagaggggcctacaaaccagcaacatgaaatggacaaaccaatctgcttaagatcctgtcatagttttagatcattggttatcctgatttgcaaagtgatcaaaagcattctagccatgtgcaaccaaacaccaccaaaaataaaatcaaacaaaactaagttgtgaaggaagggagggaaggtcatagccttcttaagcagaggtgttccattgttttagccaatccttggttgaatcttaggaatgaacagtgtctcaagctcattcacgtttcatgaccaactggtagttggcactgaaaaaacttttcagggctgtgtgaattgtgtgactgattgtcctagatgcactactttatttaaaaaataatgttcataaggagtcaatatgtagtttaagagacaatcagtgtgtgtcttataaatggtacatctgtggtttttaatctgtgctagacttcaaaactgtgatctcctgttattgtatgcaaccttgaactccacctctgcaggggttcttctgtgattaaataggttataattataagcaaaattcagagcaactgagtactgatctaaaaagattacctttggctggaggtgagctgcactgaaactttacgacaaaatgtctctggacaaagagagtcagagaagagaagcaaaaggacactaattcatctgtaatttactgttggtaagcctagcagtaaagagacattggtcaattgctctgaccctgatgaattattaaactgagatcattgtcgtttatgcttgcagatgttaaatggaaaagttatatatgcataaaccttttcttcctggatttggcagatatgtataattatattaaaatggttctagcacaaaaaaaaaaaaaaa

SEQ ID NO: 188 - DNA, 2195 bp, Homo sapiens
  source 1..2195: mol_type = genomic DNA
aaatctccctgagagcgggaccggcctcagctccaacacagcctccactgtgattaaaaataaaaattgctagagcagccctcactcgccacatctactttgatagctggctatttggaatttaaaggatatttgactttttctaacctcccatgaggctgtaagttccactgctccaaacccacccaccaaggactctgaacctgtccaccccgggcgcatcaagatcttccagctgggtacccccgatttgggccgactttgcacctccaaacaaccttagcatgatgtcttatcttaagcaaccgccttacgcagtcaatgggctgagtctgaccacttcgggtatggacttgctgcacccctccgtgggctacccggccaccccccggaaacagcgccgggagaggacgacgttcactcgggcgcagctagatgtgctggaagcactgtttgccaagacccggtacccagacatcttcatgcgagaggaggtggcactgaaaatcaacttgcccgagtcgagggtgcaggtatggtttaagaatcgaagagctaagtgccgccaacaacagcaacaacagcagaatggaggtcaaaacaaagtgagacctgccaaaaagaagacatctccagctcgggaagtgagttcagagagtggaacaagtggccaattcactcccccctctagcacctcagtcccgaccattgccagcagcagtgctcctgtgtctatctggagcccagcttccatctccccactgtcagatcccttgtccacctcctcttcctgcatgcagaggtcctatcccatgacctatactcaggcttcaggttatagtcaaggatatgctggctcaacttcctactttgggggcatggactgtggatcatatttgacccctatgcatcaccagcttcccggaccaggggccacactcagtcccatgggtaccaatgcagtcaccagccatctcaatcagtccccagcttctctttccacccagggatatggagcttcaagcttgggttttaactcaaccactgattgcttggattataaggaccaaactgcctcctggaagcttaacttcaatgctgactgcttggattataaagatcagacatcctcgtggaaattccaggttttgtgaagacctgtagaacctctttttgtgggtgatttttaaatatactgggctggacattccagttttagccaggcattggttaaaagagttagatgggatgatgctcagactcatctgatcaaagttccgagaggcatagaaggaaaaacgaagggccttagaggggcctacaaaccagcaacatgaaatggacaaaccaatctgcttaagatcctgtcatagttttagatcattggttatcctgatttgcaaagtgatcaaaagcattctagccatgtgcaaccaaacaccaccaaaaataaaatcaaacaaaactaagttgtgaaggaagggagggaaggtcatagccttcttaagcagaggtgttccattgttttagccaatccttggttgaatcttaggaatgaacagtgtctcaagctcattcacgtttcatgaccaactggtagttggcactgaaaaaacttttcagggctgtgtgaattgtgtgactgattgtcctagatgcactactttatttaaaaaataatgttcataaggagtcaatatgtagtttaagagacaatcagtgtgtgtcttataaatggtacatctgtggtttttaatctgtgctagacttcaaaactgtgatctcctgttattgtatgcaaccttgaactccacctctgcaggggttcttctgtgattaaataggttataattataagcaaaattcagagcaactgagtactgatctaaaaagattacctttggctggaggtgagctgcactgaaactttacgacaaaatgtctctggacaaagagagtcagagaagagaagcaaaaggacactaattcatctgtaatttactgttggtaagcctagcagtaaagagacattggtcaattgctctgaccctgatgaattattaaactgagatcattgtcgtttatgcttgcagatgttaaatggaaaagttatatatgcataaaccttttcttcctggatttggcagatatgtataattatattaaaatggttctagcacaaaaaaaaaaaaaaa

SEQ ID NO: 189 - DNA, 3244 bp, Homo sapiens
  source 1..3244: mol_type = genomic DNA
ctctccggcgtctccgcctggaggggaagatgcggcctgcctggcccgccgcctcgcccccggcctcacggtgggaccccgggcactgaggacggaggtcccgggcgccggcccgcggggcaacgggcactaggtgagagccggacgcgggcgagcgaaggaggcgggtgccgggcgactccagcggcggcccctgcccctcccccgcacccacgaacacgctcgcccgatatattgcagaggcttctccggtcgccgctgcgccagtttttttttgtttgtttgttgtgttttccctggcaaacagctggagaaagagcagctcatggagaggctgagagaagcggttttcgcgtcctacccaaactgggagagtaaccttcagcagctggactcaccgattggttttccttcattttcagtgaaatcccattctctggctggagacacagatggcctcaaatgagagagatgctatatcgtggtaccaaaagaagattggagcctacgatcagcagatatgggaaaagtcaatcgaacagactcagattaagggtttgaaaaacaaaccgaaaaagatgggccacataaagccagacttgattgacgttgacttaatcagagggtcaacatttgccaaagcaaaacctgaaattccatggacatctctgactcggaaggggcttgttcgagttgtattttttccattgttcagcaattggtggattcaggttacctctttaagaatctttgtttggctgttactactttatttcatgcaagttatagcaattgtcttatatttgatgatgcctattgtgaacataagtgaagtacttggacccttgtgccttatgctactcatgggaactgtccactgtcaaattgtgtctactcagataacaagaccatcaggaaacaatggaaatcgaagaagaagaaaattacgaaaaactgtaaatggtgatgggagccgagaaaatggaaataactcctctgataaagtcagaggaatagaaactttggaatctgtacccattattggtggtttttgggagactatctttggcaacaggattaaaagagtaaaattaatatctaacaaagggactgaaactgacaatgacccaagttgtgtccatcctatcattaagaggagacaatgtcgaccagagattagaatgtggcaaacaagagagaaagcaaaattttcagatggagaaaagtgccgtagggaggcttttaggcgtttgggtaatggggtgtctgatgacctgtcaagtgaagaagatggtgaagcacggacacagatgatattattgcgtaggagtgtggaaggggcctcaagtgacaatggttgtgaagttaagaatagaaaatcaatactttcaaggcacctaaactctcaggtaaagaaaaccactacaaggtggtgtcatattgtgcgggattcagatagtctggctgaatcagaatttgaatcagcagccttcagccagggctctagatcgggtgtgagtggtggctctcgaagcctcaacatgtcaagaagagactcagaaagcacccgccatgactcggagactgaggacatgttatgggacgacctgctacatggcccagagtgccggtcatctgtcaccagtgacagtgagggggcccatgtgaatacccttcactcagggaccaaacgtgaccccaaagaggatgtttttcagcagaatcatttattctggcttcagaattcaagtccttcctctgatcgagttagtgcaataatctgggaggggaatgagtgcaaaaagatggatatgtctgtgttggaaataagtggcatcatcatgagcagggtcaatgcctatcagcaaggagtaggttatcagatgctgggaaatgttgtcactattggattagcattttttccattcttacatcgacttttccgtgagaagagccttgaccaactaaagtccatttcagctgaggagatcttgactctcttttgtggggcaccacctgttacacctattattgttttgtcgataattaatttttttgaaagattgtgtcttacttggatgttttttttcatgatgtgtgtggcagagagaacatataaacagagatttttatttgcaaaactcttcagccatattacttctgccaggaaagctaggaaatatgaaatacctcatttcagacttaagaaggtggagaatattaaaatatggttatcactgcgttcctatctaaagagacgggggccacagcgttcagttgatgtggttgtatcctcggttttcctactgacactttcgattgctttcatttgttgtgctcaggttctccaaggacataaaactttcctgaatgatgcttataactgggagtttttgatctgggaaacagctttactactttttttattgcgtctggcctcactggggtctgaaaccaataagaaatacagcaatgtttcaatattacttacagaacagattaatttatatcttaagatggaaaaaaagccaaataagaaagaacagcttactctagtaaacaatgtattaaagctgtccaccaagttgttgaaagagctggacacaccatttagactctatggactgacaatgaatcccttaatctacaatatcacaagagtagttatcctttctgctgtctcaggtgttataagtgatcttctaggatttaatataagactgtggaaaattaaatcataagctgagtaaatgcctggactctcccctggctggtatcaaaacttacctatcaaggaaagtgatgactgcagaaaccagtgagatacccacctgcttgttcacatgcacaggtgctctcagctctgccaaagcgaatgaatggtgtttccggaggagcaagtccttttccaactgggtgtgcatgctaaaaacctgtattttcatgcttttcaaacaacatgaatagtcagctgactaaagactgtgtgtgttgtggtaacacaaagacaattttgtaagtttgcgcttcagtactgtgacagttatgtttactggacatagtcttttgggcaactatgatagatgcccaaagcatgaagcaaatatcttttattggaaatatgcaaattcaatacttttccattatagtctatagaactggagatttcatttctctatcaaagagagatcaagcgaactattttaggttaaatccgaataaaagaactttactggagactttc

SEQ ID NO: 190 - DNA, 3452 bp, Homo sapiens
  source 1..3452: mol_type = genomic DNA
ggaagccgaaggctgctgcccggtggtcggctgagcggctctagcccagatctcagacggctgagtcactgcatcccggcgcggcccgcagaagacgagcgccgctgccgccgcctcctcctcccgggctcccgggctctcggggtccggggcctttgcacctgtcttttccagctgggcacaaagccttttgctgtcgccgtggcgactggaggccttcacttttaatccccctcattttccagttcattctctgcttattttctggtcagtccgtgaccctgtaggcggcctctgaccggcgatcgatttgccgccctcagggcgctgggcggccggctgcctccgaagctggggcggcctccgcggtctccatggtaacggcctctccggcgtctccgcctggaggggaagatgcggcctgcctggcccgccgcctcgcccccggcctcacggtgggaccccgggcactgaggacggaggtcccgggcgccggcccgcggggcaacgggcactagctggagaaagagcagctcatggagaggctgagagaagcggttttcgcgtcctacccaaactgggagagtaaccttcagcagctggactcaccgattggttttccttcattttcagtgaaatcccattctctggctggagacacagatggcctcaaatgagagagatgctatatcgtggtaccaaaagaagattggagcctacgatcagcagatatgggaaaagtcaatcgaacagactcagattaagggtttgaaaaacaaaccgaaaaagatgggccacataaagccagacttgattgacgttgacttaatcagagggtcaacatttgccaaagcaaaacctgaaattccatggacatctctgactcggaaggggcttgttcgagttgtattttttccattgttcagcaattggtggattcaggttacctctttaagaatctttgtttggctgttactactttatttcatgcaagttatagcaattgtcttatatttgatgatgcctattgtgaacataagtgaagtacttggacccttgtgccttatgctactcatgggaactgtccactgtcaaattgtgtctactcagataacaagaccatcaggaaacaatggaaatcgaagaagaagaaaattacgaaaaactgtaaatggtgatgggagccgagaaaatggaaataactcctctgataaagtcagaggaatagaaactttggaatctgtacccattattggtggtttttgggagactatctttggcaacaggattaaaagagtaaaattaatatctaacaaagggactgaaactgacaatgacccaagttgtgtccatcctatcattaagaggagacaatgtcgaccagagattagaatgtggcaaacaagagagaaagcaaaattttcagatggagaaaagtgccgtagggaggcttttaggcgtttgggtaatggggtgtctgatgacctgtcaagtgaagaagatggtgaagcacggacacagatgatattattgcgtaggagtgtggaaggggcctcaagtgacaatggttgtgaagttaagaatagaaaatcaatactttcaaggcacctaaactctcaggtaaagaaaaccactacaaggtggtgtcatattgtgcgggattcagatagtctggctgaatcagaatttgaatcagcagccttcagccagggctctagatcgggtgtgagtggtggctctcgaagcctcaacatgtcaagaagagactcagaaagcacccgccatgactcggagactgaggacatgttatgggacgacctgctacatggcccagagtgccggtcatctgtcaccagtgacagtgagggggcccatgtgaatacccttcactcagggaccaaacgtgaccccaaagaggatgtttttcagcagaatcatttattctggcttcagaattcaagtccttcctctgatcgagttagtgcaataatctgggaggggaatgagtgcaaaaagatggatatgtctgtgttggaaataagtggcatcatcatgagcagggtcaatgcctatcagcaaggagtaggttatcagatgctgggaaatgttgtcactattggattagcattttttccattcttacatcgacttttccgtgagaagagccttgaccaactaaagtccatttcagctgaggagatcttgactctcttttgtggggcaccacctgttacacctattattgttttgtcgataattaatttttttgaaagattgtgtcttacttggatgttttttttcatgatgtgtgtggcagagagaacatataaacagagatttttatttgcaaaactcttcagccatattacttctgccaggaaagctaggaaatatgaaatacctcatttcagacttaagaaggtggagaatattaaaatatggttatcactgcgttcctatctaaagagacgggggccacagcgttcagttgatgtggttgtatcctcggttttcctactgacactttcgattgctttcatttgttgtgctcaggttctccaaggacataaaactttcctgaatgatgcttataactgggagtttttgatctgggaaacagctttactactttttttattgcgtctggcctcactggggtctgaaaccaataagaaatacagcaatgtttcaatattacttacagaacagattaatttatatcttaagatggaaaaaaagccaaataagaaagaacagcttactctagtaaacaatgtattaaagctgtccaccaagttgttgaaagagctggacacaccatttagactctatggactgacaatgaatcccttaatctacaatatcacaagagtagttatcctttctgctgtctcaggtgttataagtgatcttctaggatttaatataagactgtggaaaattaaatcataagctgagtaaatgcctggactctcccctggctggtatcaaaacttacctatcaaggaaagtgatgactgcagaaaccagtgagatacccacctgcttgttcacatgcacaggtgctctcagctctgccaaagcgaatgaatggtgtttccggaggagcaagtccttttccaactgggtgtgcatgctaaaaacctgtattttcatgcttttcaaacaacatgaatagtcagctgactaaagactgtgtgtgttgtggtaacacaaagacaattttgtaagtttgcgcttcagtactgtgacagttatgtttactggacatagtcttttgggcaactatgatagatgcccaaagcatgaagcaaatatcttttattggaaatatgcaaattcaatacttttccattatagtctatagaactggagatttcatttctctatcaaagagagatcaagcgaactattttaggttaaatccgaataaaagaactttactggagact

SEQ ID NO: 191 - DNA, 2936 bp, Homo sapiens
  source 1..2936: mol_type = genomic DNA
attgggaacctaagtgccaggcttgtgccaggccccagtctctgacctcatggagcccacagcccactggggaacagagattaagccatgaaacacgaaaatgagtgccacaaagactgaaatcccattctctggctggagacacagatggcctcaaatgagagagatgctatatcgtggtaccaaaagaagattggagcctacgatcagcagatatgggaaaagtcaatcgaacagactcagattaagggtttgaaaaacaaaccgaaaaagatgggccacataaagccagacttgattgacgttgacttaatcagagggtcaacatttgccaaagcaaaacctgaaattccatggacatctctgactcggaaggggcttgttcgagttgtattttttccattgttcagcaattggtggattcaggttacctctttaagaatctttgtttggctgttactactttatttcatgcaagttatagcaattgtcttatatttgatgatgcctattgtgaacataagtgaagtacttggacccttgtgccttatgctactcatgggaactgtccactgtcaaattgtgtctactcagataacaagaccatcaggaaacaatggaaatcgaagaagaagaaaattacgaaaaactgtaaatggtgatgggagccgagaaaatggaaataactcctctgataaagtcagaggaatagaaactttggaatctgtacccattattggtggtttttgggagactatctttggcaacaggattaaaagagtaaaattaatatctaacaaagggactgaaactgacaatgacccaagttgtgtccatcctatcattaagaggagacaatgtcgaccagagattagaatgtggcaaacaagagagaaagcaaaattttcagatggagaaaagtgccgtagggaggcttttaggcgtttgggtaatggggtgtctgatgacctgtcaagtgaagaagatggtgaagcacggacacagatgatattattgcgtaggagtgtggaaggggcctcaagtgacaatggttgtgaagttaagaatagaaaatcaatactttcaaggcacctaaactctcaggtaaagaaaaccactacaaggtggtgtcatattgtgcgggattcagatagtctggctgaatcagaatttgaatcagcagccttcagccagggctctagatcgggtgtgagtggtggctctcgaagcctcaacatgtcaagaagagactcagaaagcacccgccatgactcggagactgaggacatgttatgggacgacctgctacatggcccagagtgccggtcatctgtcaccagtgacagtgagggggcccatgtgaatacccttcactcagggaccaaacgtgaccccaaagaggatgtttttcagcagaatcatttattctggcttcagaattcaagtccttcctctgatcgagttagtgcaataatctgggaggggaatgagtgcaaaaagatggatatgtctgtgttggaaataagtggcatcatcatgagcagggtcaatgcctatcagcaaggagtaggttatcagatgctgggaaatgttgtcactattggattagcattttttccattcttacatcgacttttccgtgagaagagccttgaccaactaaagtccatttcagctgaggagatcttgactctcttttgtggggcaccacctgttacacctattattgttttgtcgataattaatttttttgaaagattgtgtcttacttggatgttttttttcatgatgtgtgtggcagagagaacatataaacagagatttttatttgcaaaactcttcagccatattacttctgccaggaaagctaggaaatatgaaatacctcatttcagacttaagaaggtggagaatattaaaatatggttatcactgcgttcctatctaaagagacgggggccacagcgttcagttgatgtggttgtatcctcggttttcctactgacactttcgattgctttcatttgttgtgctcaggttctccaaggacataaaactttcctgaatgatgcttataactgggagtttttgatctgggaaacagctttactactttttttattgcgtctggcctcactggggtctgaaaccaataagaaatacagcaatgtttcaatattacttacagaacagattaatttatatcttaagatggaaaaaaagccaaataagaaagaacagcttactctagtaaacaatgtattaaagctgtccaccaagttgttgaaagagctggacacaccatttagactctatggactgacaatgaatcccttaatctacaatatcacaagagtagttatcctttctgctgtctcaggtgttataagtgatcttctaggatttaatataagactgtggaaaattaaatcataagctgagtaaatgcctggactctcccctggctggtatcaaaacttacctatcaaggaaagtgatgactgcagaaaccagtgagatacccacctgcttgttcacatgcacaggtgctctcagctctgccaaagcgaatgaatggtgtttccggaggagcaagtccttttccaactgggtgtgcatgctaaaaacctgtattttcatgcttttcaaacaacatgaatagtcagctgactaaagactgtgtgtgttgtggtaacacaaagacaattttgtaagtttgcgcttcagtactgtgacagttatgtttactggacatagtcttttgggcaactatgatagatgcccaaagcatgaagcaaatatcttttattggaaatatgcaaattcaatacttttccattatagtctatagaactggagatttcatttctctatcaaagagagatcaagcgaactattttaggttaaatccgaataaaagaactttactggagact

SEQ ID NO: 192 - DNA, 2989 bp, Homo sapiens
  source 1..2989: mol_type = genomic DNA
ataaactgggtgacagagtcagaaaactccccagctaaacacccgtaagacttcatacaacacaatactctatactgtgatgatcacagctgccaaggctacctaaaagaagacagttatctcatatttggctgccagctttttatctttctctcgaccacttaaaacttcagacttcctgtcctgctggtatcatggagaaagtccaatacctcactcgctcagctataagaagagcctcaaccattgaaatgcctcaacaagcacgtcaaaagctacagaatctatttatcaatttctgtctcatcttaatatgtctcttgctgatctgtatcatcgtgatgcttctctgaagttctgctacaacctctagatctgcagcttgccacatcagcttaaaatctgtcatcccatgcagacaggaaaacaatattgtataacagaccacttcctgagtagaagagtttctttgtgaaaaggtcaagattaagactaaaacttattgttaccatatgtattcatctgttggatcttgtaaacatgaaaagggctttattttcaaaaattaacttcaaaataagtgtataaaatgcaactgttgatttcctcaacatggctcacaaatttctatcccaaatcttttctgaagatgaagagtttagttttaaaactgcactgccaacaagttcacttcatatataaagcattatttttactcttttgaggtgaatataatttatattacaatgtaaaagcttctttaatactaagtatttttcaggtcttcaccaagtatcaaagtaataacacaaatgaagtgtcattattcaaaatagtccactgactcctcacatctgttatcttattataaagaactatttgtagtaactatcagaatctacattctaaaacagaaattgtattttttctatgccacattaacatcttttaaagttgatgagaatcaagtatggaaaagtaaggccatactcttacataataaaattccttttaagtaattttttcaaagaatcacagaattctagtacatgtaggtaaatcataaatctgttctaagacatatgatcaacagatgagaactggtggttaatatgtgacagtgagattagtcatatcactaatatactaacaacagaatctaatcttcatttaaggcactgtagtgaattatctgagctagagttacctagcttaccatactatatctttggaatcatgaaaccttaagacttcagaatgattttgcaggttgtcttccattccagcctaacatccaatgcaggcaaggaaaataaaagatttccagtgacagaaaaatatattatctcaagtattttttaaaaatatatgaattctctctccaaatattaactaattattagattatattttgaaatgaacttgttggcccatctattacatctacagctgacccttgaacatgggggttaggggagctgacaattcgtgggtccgcaaaatcttaactacctaatagcctactattgaccataaaccttactgataacataaacagtaaattaacacatattttgcgtgttatatgtattatacactatattcctacaataaagtaagctagagaaaatgttatttagaaaatcataagaaagagaaaatatatttactattcattaaatggaagtgggtcaacataaaagtcttcattctcattgtcttcacattgagtaggcagaggaggagaaagatggggaggaagagaaggcgttggtcttgcagtcttgtcttaggggtgtggggagtgggggaaagaatattcatgtataagtggacccttgcaattcaagcccttgttgttcaagggtcaactgtaataggatatagctatttttcttcctctatcaaccaaatggtaagcatctattttgcagtccactctactgagctaaattatagatccagctatgctatttataattattttcttgatgaataaattttcaatttctcctctgaccatttcagaacatcttccaataactcataaaacaactgaagtaaaattgagtgctggaaaatatattcaccaaactttggtaatttaagttgactaaagtttaaaattaagtctaaaatagtttacacctatactgcataatccaacaattttaatttcagttgaagacatgttactaatataactattattaaaagagtagaggatgtgtaattaaccatatcttctaaaacatggttactaaaagaatatgtaacatcaatattgaccttggtttcttacacaagtgttgctaactcaatagtgaaggagacactattaaattttctgaacccatgagagatactagagatggggagtggaaagtgtttggttcagggatatctgaagaacagaagggcagagatttcttaagtgacgcctcatctacaagctggaaattcctaaaaacaagtagaaagcttataaacaacaggtgatacactcacctcactggttttagtaaattaccaatacagaaagtatccctagtcttaaaaacaagtggaaaatttgaactgattagtcatattcctttgattacactgtttgttacaatatttttctcagtaaacagaaataactaatttttttgttcttcattctttgatagaaattaaaatcttattctgtgaggattacagaatactataactcaaattataaagtagaataaactctttaaataattattcttcatcataaagtgtaaagaataagatataagaaaacaatttatttttaaaatttaatatactaaatgctcaaatatgttctactatagaataagttcttatcttaatttacagggcactaaaaacaattttaaaatgcttaatgttgccttttatattttaattggttaagaatatatatttgtttaatgcaaatcagaatcactatattaaaatgaatgttcttgaaaactca

SEQ ID NO: 193 - DNA, 706 bp, Homo sapiens
  source 1..706: mol_type = genomic DNA
aatctggttgagagcggcaataatccagaatggctactctgatctatgttgataaggaaaacgaagaaccaggcatccttgtggctacaaaggatgggctgaagctggggtctggaccttcaatcaaagccttagatgggagatctcaagtttcaatatcatgttttggcaaaacattcgatgctcccacatccttacctaaagctaccagaaaggctttgggaactgtcaacagagctacagaaaagtcagtaaagaccaatggacccctcaaacaaaaacagccaagcttttctgccaaaaagatgactgagaagactgttaaagcaaaaaactctgttcctgcctcagatgatggctatccagaaatagaaaaattatttcccttcaatcctctaggcttcgagagttttgacctgcctgaagagcaccagattgcacatctccccttgagtgaagtgcctctcatgatacttgatgaggagagagagcttgaaaagctgtttcagctgggccccccttcacctttgaagatgccctctccaccatggaaatccaatctgttgcagtctcctttaagcattctgttgaccctggatgttgaattgccacctgtttgctctgacatagatatttaaatttcttagtgctttagagtttgtgtatatttctattaataaagcattatttgtttaacagaaaaaaa

SEQ ID NO: 194 - DNA, 2253 bp, Homo sapiens
  source 1..2253: mol_type = genomic DNA
atctaatgaggagcgaggtgcggtgccccgaagcgctcgcttcccgcggtgcgatctagtcctgcagtaggcggcccggggccacaccgcggccgcccaagccagtgcaaggcccaggggcctgacatcgctcccagcgctcgaggaccgaggcctgctgtggaggacaccgtgctccctcgggacctgctctggattccggcccggacgtccccttggagctctgcatctccaacctggaacccaacccagaagtctcaagtttgacgcatcacgtggcgtgcggatccactgagggtccacagagaggggcgcccatctcctgcgtctcagttatcctggtgttgggaattctgtgccctaaagaattccgactcagatccgaacggggatctggtggaatcgagggtgaaagaccagagggacaatgttctactatcccaacgtgcttcagcgccacaccggctgctttgccaccatctggctggcggcgactcgcggcagccggttggtgaagcgcgaatacctgagggtgaatgtggtgaaaacctgcgaggaaatcctcaattacgtgctggtacgagtgcaacccccgcagcccggcctgccgcggccccgcttctccctctatctctcagcccaacttcagatcggtgtgatccgcgtctattctcaacaatgccagtacctcgtggaggacatccagcacatcttggagcgcctccaccgtgcccagctgcagatccgaatagatatggagactgagctacccagcctgctgcttcctaaccacctggccatgatggagaccctagaagatgctccagatcccttttttgggatgatgtctgtggatcccagacttcctagtcctttcgatatccctcagattcgacacctcttagaggctgcaatcccagagagagttgaagagatccctcctgaagttcctacagagcccagggagccagagaggattccggtcactgtgctgccacctgaggccatcacgatcctggaggcagagcccatacggatgctggagattgagggtgaacgggagctcccagaggtcagccgccgagaactggacctgctgatcgcagaggaagaagaagctatcttgttagaaatcccgcggctcccacctccagctcctgcagaggtggaaggaataggagaggcactgggtcctgaggagctgaggctgacaggctgggaacctggggccctactcatggaggtgacccccccggaggagctgcgtctgccagccccacccagcccagagaggaggcccccagtccccccacctcctcgccgccgccgtcgtcgccggttactgttctgggacaaggagactcagatctccccggagaaattccaggaacaactgcaaaccagagcccactgctgggaatgtcctatggtgcagccgcccgagaggaccatcagaggccctgcggagttgttcagaaccccaactctctctggctggctaccccctgaactactgggtctctggacccattgtgcccagccacccccaaaagccctcaggcgagagctgcctgaggaggcagccgctgaggaggaaaggagaaagattgaagttccaagtgagattgaggtcccgagggaggccctggagcccagtgttccccttatggtgtctttagagatctccctagaggcagctgaagaggagaagtcccgcatcagcctcatcccaccagaagaacggtgggcctggcctgaggtggaggcgccagaagctcctgcattgcccgtggtgcctgaactccctgaggtgcccatggagatgcctttggtgctgcccccagagctcgagctgctctcactggaagcagtgcacagggcagtggcactggagctgcaggctaacagggagcccgacttcagcagcctggtgtcacctctcagcccccgcaggatggctgcccgggtcttctacctgctcctggtgctctcagcgcaacagattcttcacgtgaaacaagaaaagccatatggtcgcctcctgatccagccggggcccagattccactgaggttagagtccatttacaaagctgccaggaaaccggccacttctagtaaaccacgtcgtgcctcactgggtcctgcttacctcatttctgaatgtgcatttccagccttcttgctctcagagctattgttcaagcagaaaacaagctgcttttattacagtaaaaaaaaaaaaaaaaaaaaa

SEQ ID NO: 195 - DNA, 2276 bp, Homo sapiens
  source 1..2276: mol_type = genomic DNA
ctagtcctgcagtaggcggcccggggccacaccgcggccgcccaagccagtgcaaggcccaggggcctgacatcgctcccagcgctcgaggaccgaggcctgctgtggaggacaccgtgctccctcgggacctgctctggattccggcccggacgtccccttggagctctgcatctccaacctggaacccaacccagaagtctcaagtttgacgcatcacgtggcgtgcggatccactgagggtccacagagaggggcgcccatctcctgcgtctcagttatcctggtaattgtgtatctgcccattgttcgttgcctcattaacttggctttctaggtgcacccaccttgccaccagagaagtccaaatcctgacttctctccaaggtgttgggaattctgtgccctaaagaattccgactcagatccgaacggggatctggtggaatcgagggtgaaagaccagagggacaatgttctactatcccaacgtgcttcagcgccacaccggctgctttgccaccatctggctggcggcgactcgcggcagccggttggtgaagcgcgaatacctgagggtgaatgtggtgaaaacctgcgaggaaatcctcaattacgtgctggtacgagtgcaacccccgcagcccggcctgccgcggccccgcttctccctctatctctcagcccaacttcagatcggtgtgatccgcgtctattctcaacaatgccagtacctcgtggaggacatccagcacatcttggagcgcctccaccgtgcccagctgcagatccgaatagatatggagactgagctacccagcctgctgcttcctaaccacctggccatgatggagaccctagaagatgctccagatcccttttttgggatgatgtctgtggatcccagacttcctagtcctttcgatatccctcagattcgacacctcttagaggctgcaatcccagagagagttgaagagatccctcctgaagttcctacagagcccagggagccagagaggattccggtcactgtgctgccacctgaggccatcacgatcctggaggcagagcccatacggatgctggagattgagggtgaacgggagctcccagaggtcagccgccgagaactggacctgctgatcgcagaggaagaagaagctatcttgttagaaatcccgcggctcccacctccagctcctgcagaggtggaaggaataggagaggcactgggtcctgaggagctgaggctgacaggctgggaacctggggccctactcatggaggtgacccccccggaggagctgcgtctgccagccccacccagcccagagaggaggcccccagtccccccacctcctcgccgccgccgtcgtcgccggttactgttctgggacaaggagactcagatctccccggagaaattccaggaacaactgcaaaccagagcccactgctgggaatgtcctatggtgcagccgcccgagaggaccatcagaggccctgcggagttgttcagaaccccaactctctctggctggctaccccctgaactactgggtctctggacccattgtgcccagccacccccaaaagccctcaggcgagagctgcctgaggaggcagccgctgaggaggaaaggagaaagattgaagttccaagtgagattgaggtcccgagggaggccctggagcccagtgttccccttatggtgtctttagagatctccctagaggcagctgaagaggagaagtcccgcatcagcctcatcccaccagaagaacggtgggcctggcctgaggtggaggcgccagaagctcctgcattgcccgtggtgcctgaactccctgaggtgcccatggagatgcctttggtgctgcccccagagctcgagctgctctcactggaagcagtgcacagggcagtggcactggagctgcaggctaacagggagcccgacttcagcagcctggtgtcacctctcagcccccgcaggatggctgcccgggtcttctacctgctcctggtgctctcagcgcaacagattcttcacgtgaaacaagaaaagccatatggtcgcctcctgatccagccggggcccagattccactgaggttagagtccatttacaaagctgccaggaaaccggccacttctagtaaaccacgtcgtgcctcactgggtcctgcttacctcatttctgaatgtgcatttccagccttcttgctctcagagctattgttcaagcagaaaacaagctgcttttattaca

SEQ ID NO: 196 - DNA, 7723 bp, Homo sapiens
  source 1..7723: mol_type = genomic DNA
atgccgctggcgcagctggcggacccgtggcagaagatggctgtggagagcccgtccgacagcgctgagaatggacagcaaattatggatgaacctatgggagaggaggagattaacccacaaactgaagaagtcagtatcaaagaaattgcaatcacacatcatgtaaaggaaggacatgaaaaggcagatccttcccagtttgaacttttaaaagtattagggcagggatcatttggaaaggttttcttagttaaaaaaatctcaggctctgatgctaggcagctttatgccatgaaggtattgaagaaggccacactgaaagttcgagaccgagttcggacaaaaatggaacgtgatatcttggtagaggttaatcatccttttattgtcaagttgcattatgcttttcaaactgaagggaagttgtatcttattttggattttctcaggggaggagatttgtttacacgcttatccaaagaggtgatgttcacagaagaagatgtcaaattctacttggctgaacttgcacttgctttagaccatctacatagcctgggaataatttatagagacttaaaaccagaaaatatacttcttgatgaagaaggtcacatcaagttaacagatttcggcctaagtaaagagtctattgaccatgaaaagaaggcatattctttttgtggaactgtggagtatatggctccagaagtagttaatcgtcgaggtcatactcagagtgctgactggtggtcttttggtgtgttaatgtttgaaatgcttactggtacactccctttccaaggaaaagatcgaaaagaaacaatgactatgattcttaaagccaaacttggaatgccacagtttttgagtcctgaagcgcagagtcttttacgaatgcttttcaagcgaaatcctgcaaacagattaggtgcaggaccagatggagttgaagaaattaaaagacattcatttttctcaacgatagactggaataaactgtatagaagagaaattcatccgccatttaaacctgcaacgggcaggcctgaagatacattctattttgatcctgagtttactgcaaaaactcccaaagattcacctggcattccacctagtgctaatgcacatcagctttttcgggggtttagttttgttgctattacctcagatgatgaaagccaagctatgcagacagttggtgtacattcaattgttcagcagttacacaggaacagtattcagtttactgatggatatgaagtaaaagaagatattggagttggctcctactctgtttgcaagagatgtatacataaagctacaaacatggagtttgcagtgaagattattgataaaagcaagagagacccaacagaagaaattgaaattcttcttcgttatggacagcatccaaacattatcactctaaaggatgtatatgatgatggaaagtatgtgtatgtagtaacagaacttatgaaaggaggtgaattgctggataaaattcttagacaaaaatttttctctgaacgagaggccagtgctgtcctgttcactataactaaaaccgttgaatatcttcacgcacaaggggtggttcatagagacttgaaacctagcaacattctttatgtggatgaatctggtaatccggaatctattcgaatttgtgattttggctttgcaaaacagctgagagcggaaaatggtcttctcatgactccttgttacactgcaaattttgttgcaccagaggttttaaaaagacaaggctatgatgctgcttgtgatatatggagtcttggtgtcctactctatacaatgcttaccggttacactccatttgcaaatggtcctgatgatacaccagaggaaatattggcacgaataggtagcggaaaattctcactcagtggtggttactggaattctgtttcagacacagcaaaggacctggtgtcaaagatgcttcatgtagaccctcatcagagactgactgctgctcttgtgctcagacatccttggatcgtccactgggaccaactgccacaataccaactaaacagacaggatgcaccacatctagtaaagggtgccatggcagctacatattctgctttgaaccgtaatcagtcaccagttttggaaccagtaggccgctctactcttgctcagcggagaggtattaaaaaaatcacctcaacagccctgtgaagtgacctcagtgagatatttggtaccatggtgtaagctgatagcacaagttctggcgacaggtagcacgtatctgagagacacctgcaagcacacactgtcccagctggtacccataatgctgctgttcctgctgctgctcctgctttcctctcttctcgctttaaatgattgttagcaagttagattttcctggagcttcggaagaaatgaaaatggaaacatgatgaagatatagtcactgaatcaatgagaaaaataatgaacatatgaataccacctaaaaatacactgaataaagtacaccatatagcattatttttataggaaatatttcatgtcccttaaatattctttgttagttatagggatggacagtttatgttaagcacttagcttaaacaatccgtttatattagcactgtatcccttgtgccatccaacattttgtatgtttttgtaaacagttcatatacagtacatttctgtactgctttctttaatgtatacatgccttgtttaacttggaatctattattattaatcaattgactattaaatctggttaaatagttcacctggattaacagtattgttggacagtcctaaaaatggccagattgtggaacagctgttgaatgtaatacttccaaaatgtacatatctttccccacgtctgtttcactggttcgttcatttgtttgtttcttaaagtcaggtgctctgtcagactaacctagagagctgttatggtagagaaagttatcatatgtgtgtggcatgaaatcaagaatacacctatgaagttagtccatatactttgcaactccttagagtacttttttccttaattaaggaagtagtccttgcacttctaatcttacatagcatccatacttagaatttggcatatcatctgggattttgccaatatacgtcaaagccctttaagagtcatggtaaggagatgggtgaaggaaaatttagcaacaggtaattgaagtcctattggatatttcatgtttaaatagatattctatattaaacactaatttaaatgtaataaaggccaaaggcctctgtatgaaattggatttaaactttcttattttagggaataaaacattattgatcaaacagtatctgttctaacctaaaattataggtagggcaggctaagtgaacagcattgagtattttctgaatccctcatgataatttatagccacatactgcttcctttgacttcaggaatgatcagttttcataatggccactgggcctgcttagattgcagtattcattatctgcatctaatttggtagtttccacaatcgtatttgatgaaagaaacttcagtccccattattacctgtgtctttgccaagctgcctagcatacatcagtatgtaatgtaaaagacatatgagcaagaaaaaagtgatttaacttacctcatcaagaatgtgcccctacaggccgggcgcagtggctcacgcctgtaatcccagcattttgggaggccgaggcaggtggatcacctgaggtcaggagtttgagaccagcctggccaacatggtgaaaccccgtctctactaaaaaatacaaaaattagctgggcatggtggcgtgcacctgtaatcctagctactcaggaggctgaggcaggagaatcgcttgaacctgggaggtggtggttgcagtgagccaagatcacaccattgcactccagcctgggtgacagagtgagactctgtctcaagaaggaaaaaaaaaaaaaagaatgtactcatacagatttttgttagtcatcatgtaataagccatttatatcagaaaccttttttcctgccacagaagctttaaattttcccctaagagtacaaagccaagagagtgtggtttatctaaatgtcctgaaatccacttgtcattccttaatttctcctctatgcaattaaagagaaaggggaaatctataacatttcttttgcccaagtgacacaaaaatgattactgcatagaaatcaaatgtaagtttagcttctaaatgaaataatatataggagggatatcagaatgtctagatagagaaagtattttcaaattcttgaatatatggatgctattaaaagctgctttccattgcctggaaagagagcttttttccctcctctattcagtgtttcaaactttggtcatctcaaattattgtcacttttaaaatgttaatgtcattctgagcagaaatagatatattttcagatttttttacactgatgctactccgtaattgcttaggagtattgtccatcatagtattttagaactagaagtaaacacataaatccttataaattacccaatccaactttctcatattgcatgtagagaacctgagacacatatcaaagtctagaatccttaacttctccccattttgtttttttccgcctcatcacaccatgctgcctttccctcatatgatcaccaaccagtagctgagttcaaaaactacatatttcttgggcagtcctctactggtatgtgatgccaacttttatttctttcgaagataattgccttctttgcctagccaagcagccaattttattggagaaaagcaagttatatgttcacaaaatggaaggctttctacctaaatttatttcatctgtggtcctcttattctcttccattgcttttgacatacagtggaaaaacttggccaacgatgtgctctaaatatagtgcttgtgttgggttaacttttccattaatttctcaacatcaattattcaggcccctacagttgtggtattgaggcccctaaaggcttctgcctttcaccaattagtgctgccagttactgaggcttctcccaaaaggtatcagtccagtcttaaagatatttcattgtgaaagaagaaactaaactatcaggcctcttttacaaaatgagagattgaatttaagcttgtcaagcacgtactggaaggtatgaattacactaccatgtgttttgtatcttccctttcaagtgatgatgttaaatgaaggtaagtttttcatccttttttaatttttgttttttataaatcatttcagctttttctggtttatagaggtgtcttatttctaatgcaacagacccccaactttaacagatttgatatggatgcatttattcacaagcaaccccaaaagtccaaaaatgtaataattttgacaaggcccaaagttgagatgctatgaagcttgtgtgtgtgaaaagtcagttatgattgtctggagagaagctgtggtgtgtatgctgtagagtttccacatttcacatgcagtgtactccaaaaagcgggtttgggtcaaccatttcccatctctttttaagaagtgactgctgttggggccaggggacatcatgggaggtggggctgtccagttagctgtgccctgcaccttcagcccaggaaagatttgaacagagcaaaggcttcaagagagggcagaatgtattcggcagaaaagggactcaggtaagcccagcctgggatgagagcagaaaagcattcaagatttgcaggccttgctatggatgcgcttaatcaccatggaggccagcaatacccatctcagcatggctttgatattctctacttcctggcctttaaaaatgacctataatttttcagtttgctttactatattttataaagaaaattctatcttatggttgattgagcattgagacttatgaaggcattaggatagatagctcaggaatgtaaaggttcagaaaaggtctgttttctcagattaacaaatatgatggattccatggctgaccttggtgcttaaaccaggaggtttcaatctagtcctagagttgtgtccctctgaaaggcccaatgccatgtaactaactttaaactggatatatactttgagccttacttaattcacagataagttgacttaactcagtatttttatttcaattaatgaaaacagtcctcttttcaaccccaggttgcttacattttgctggtctccccaagtgaccattggtggagaccaattaatgaaggaatgaaattcactttattgggactgtggtattcaacagagccacacttaaccactttttccaatgaagaatctccagaatgataatgcccaaatatggatggccaagaagaatttgtatctacggtgtgctttatgtgtttttgacactgctgtattctgtgtgatcaagtgatttgcagctggttccaatgtgactgagtgttctcaaagatttctagtaactaagtcaacttaattttcttaagcctggtattactatcagcctcacatttaccactttgattctagttttttaactgttcataacagggcataccgagggttgggatgagagcctacttcctacctcttaaggcactttcctcattattttgccatataatcttgaactgcatgataagctgtttaaatgtccatgacttctcccagagcaactagcaaagtatatgacattttgaatagagattagtggaaaggaaaatgtagagatttaagttcagaggtacaaacctcaataaaacctccttagagcacataccatgagtagagtatatgtaaacgtatatgagaagagagtcgctataatagtcctctctaagtagattagttcattgtctaatggaagtgaacatctttactcctgttatcaccatagtactgaatgaactgtataatgagtttttcaaacaagtatttaaaatagaactttcacgtacaaagcaagggcataaagattttggtttgtgtttctgtaagtgtagtttaccatctaaagctttggtttttaattttaaaaaaagcttcaaggtattgccattccttagcatccttattgattatgggtgatgagtttttaactcttaaaatcatatacgtgtattagtttatcttaactgttgccctaagcaaaagggaaggtatacacctaagggatgtacttattttgcatttttggtcatgggtgggaatggggtgggtgcctacttaaatagtttttaaaaaagaaaaaaatcacaaatatttttctactgttatatatgatcttcctttatactagtttctctctagtaaggcatgccagaagcccaagataccatatcatgaattcttacatattgtaccttttgttggtggttaaatcgcatcagatgcttggcattgctgccataattataaaatgcttgtaaaggatcaaatatcactaaatactttaaattgttttacttaagagtctaatctgggaagttttcaaatcatactattaatgtgtaatctaagctcttcagatgtatccatgaataatcctggaacaatattgcttgtattcctgtcatagaacaggttttgtaatctttaaaagaaatgaaaatttatataataaagtttcaaatcaatgcaaaaaaaaaaaaaa

SEQ ID NO: 197 - DNA, 3975 bp, Strongylocentrotus purpuratus
  source 1..3975: mol_type = genomic DNA
acatgtactgcggagctgggacagcatcacttctaggtaaatccttgtcaatttcggggcgtgtcacatcggacctaccgtcgcccaaatcgtcttaactctgttaacgctctttcaatatgggcgttgtggaagccgtgctcgtatcgtgcttgttcctaggctcattgttgtgcctaacatctgcagccagtctcaagagcatcgatgacgatgcaacaaaatatattgaccagatcaaacggcaaattaatcaagatgtcctatcgaagcttcctttctgccagcgatatgacgggtctcgggggttccgttgcagtgacggtggttgtgtacgattgagggaggtttgtgatggcgcaccagactgtactgacgtcgtcgaaacggccgatgatgaggacccgacgtactggctagttaataatctggaagagccctgtagtacctaccagtgtgctggtggccaatgtatctcatgggaagcaacgtgtgatggtgaccctgaagactgtggctacactggggaggacgagagcgcagcactgtgcggggtgacatgccctggtgacgtcagaaggttccattgtgacaactcgatttgcattgaacgatccctgatctgcgacctccgctgtaattgtgacaactgcgatgacgaggctggctgtgcctcattcacacatacatgtgacgacgataagcagttcagatgtgatgacggtacttgtattcttaacgaacagctgtgtgatgggaagacggactgtaaatcgggcggagaggatgaagaaggctgtgtggatgaatatggatgccacattcgacgagagttttactgcgaagtgaactataaatgtcttcaacgtgatagacggtgtgatggtacggtggactgccccggtggagatgatgagaaggcgtgtggcctgaatacgtgcttcaaatatgagttccaatgcgccaagcgtaagtgcatcgagaaagaaaaacgatgtgacaatgttattgactgtccatcgccgggtgaagacgaattgggatgcagtcgagaatgcactgaggaagaattcaaatgccttgacggggaatgcatccctctctaccgggcctgcgatggttttgccttcgactgcaagtcttacttcggtgaggatgaggaggggtgtggtcagagagaatgtcctcaagactggtattcttgtttcaacggcaggtgtctcccggaaaactttaggtgcgatggcgaacctgattgcagctttggcgaagacgagaccaactgcgtagaaccgattatatcaccttgtgcacaagatgagtttagctgtggcaacagcatttgcatcgctgaatcacggcattgcaatggctacaatgactgctatgatggaatagatgaaaagaactgcaacatagagtcatgtcctacaggacaggttgattgtggcaacaactattgtgttgttggagccagatgtgatggagtatctgactgcagcaacggacaagacgaaagtggatgtccacctacaatagttacatgtcccgcagggcgtattgattgtggcactaactattgtgttgttggagccagatgtgatggagtatctgactgcagcaacggacaagacgaaagtggatgtccacctacaatagttacatgtcccgcagggcgtattgattgtggcactaactattgtgttgttggagccagatgtgatggagtatctgactgcagcaacggacaagacgaaagtggatgtccacctacaatagttacatgtcccgcagggcgtattgattgtggcaccaattattgtgttgttggagccagatgtgatggagtatctgactgcagcaacggacaagacgaaatcggatgtccaccaacaatagttacatgtccggcagggcgtgttgattgtggcaacaactactgtgtcgttggtagcaaatgtgatggagtatctgactgtagcaacggacaagacgaaagtggatgtccacctacaatagttacatgtcccccagggcgtatcgattgtggcaccgactattgtgttgttggagccagatgtgatggagtatctgactgcagcaacggacaagacgaaattggatgtccacctacaatagtaacatgtccggcagggcgtgttgattgtggcaacaactactgtgtcgttggtagcaaatgtgatggagtatctgactgcagcaatggacaagacgaaagtggatgtccacctacaacaagtgcatgtcctgaagggcgtgttgattgtggcaacaactactgtgtcgttggtagcaaatgtgatggagtatctgactgtagcaacggacaagacgaaagtggatgtccacctacaacaagtacatgtcctgaagggcgtgttgattgtggcaccgactattgtgtttttggagccagatgtgatggagtatctgactgcagcaacggacaagacgaaattggatgtccacctacaatagtaacatgtccggcagggcgtgttgattgtggcaacaactactgtgtcgttggtagcaaatgtgatggagtatctgactgcagcaatggacaagacgaaagtgaatgtccacctacaacaagtgcatgtcctgaagggcgtgttgattgtggcaacaactattgtgtcgttggtggcaaatgtgatggagtatctgactgcagcaacggacaagacgaaagtggatgtccacctacaatagttacatgtccggcagggcgtattgattgtggcaccaattattgtgttgttggagccagatgtgatggagtatctgactgcagcaacggacaagacgaaagtggatgtccacctgcaatagttacatgtccggcagggcgtgttgattgtggcaacaactactgtgtcgttggtagcaaatgtgatggagtatctgactgcagcaacggacaagacgaagagggctgttcattcagttgtagatctcgaggagactgtgaattctttggaactgaggctgtggaatctcttgagcaacgagtgacaaaattagaacaattagatttagagaacatactggttttagagaacatactggtttaccttcaagatcagattgactacctctttgcttcacagcaatattatgcacatggggctgatgacgaggaacaggtggatagtaatcatcttgatgaagcagatcttgatgaagcagatttttcaaattcaacatctaccaatgcatcagaagataccacattgtcagtgaatacatcagaaacggggtcgtcggaaacgaatactctgccaacaacttcagcagctgacaccaaggaacctgtagctcagcagtacgtcgagtctgcgtctgatacatcaacaggtaaagagtctgacacaacaacagttccagcaacaacatctaccaatgcatcagaagataccacattgtcagtgaatacatcagaaacggggtcgtcggaaacgaatactctgccaacaacttcagcagctgacaccaaggaacctgtagctcagcagtacgtcgagtctgcgtctgatacatcaacaagtctgttcttagttccagcaacagttccagcaacaacatctaccaatgcatcagaagataccacattgtcagtgaatacatcagaaacggggtcgtcggaaacgaatactctgccaacaacttcagcaccgaacaccaaggaacctgtagctcagcagtacgtcgagtctgcgtctgatacatcaacaggtaaagagtctgttccagcaacagttccagcatcatccaatgcaacagaagataccacattgacagtgaatacatcggcaccagggtcgtcggaaacgacatctctgacagcaacttcagcaccctttaatattataaaaagaatcttttaatttttgagcagaggttagggccttaaggataagcttaaagcccacaatggaaaaatccacc

SEQ ID NO: 198 - DNA, 3926 bp, Lytechinus variegatus
  source 1..3926: mol_type = genomic DNA
cgcgggaaggattcgaaaaaggacgttgcaatctatagttttgtcatttttttcggctgccattttcctctttgatcttagaagaaaatggcggctctcttccacgttctcattgctctacagtgcactatctccatcgttttaagtaagcctgttgaattgactgaaagttggaaaggctcacccaagaaacaaccgatttggagagatcaaccgatggacatcggcaatgagatcgaccttggcaagagaaatgcattcggaaattgcatgccaccgggatccgatgtccctgggttccggtgtgcaacgagtcaggaatgtatccctttgggtgaggtctgcgatggcgtcaatgattgcgacttcgatgcctacgacgagacggatgatgcgtgtatggtagtccaatgcgaaggattcctctgtaccgatgggtcgtgtctcctcgccgagttcgtgtgcgatggatcttacgattgcagtgatcgcatggatgaagaggaatgtagcatgaatcagtgcagcgctgatcgcttccaatgccggagtggacggtgtatcccaaccttctggcggtgtgatatgcttgaggactgccagggaggggaggacgagcgaggatgcgatgaacacgtttgtccgggggacgaatttcgctgtgacaccggctcttgtgtcatccgcctttgggtttgcgacggtcagagtgattgtccccatggcgaagatgagacagttggttgtaacgtcgttgtggactgtgatgacgaccagttccagtgtggagacgattcgtgtatacctaaaaattgggtctgtgatggagttgacaactgtcccttaggtgaagatgaaaaccaagattgttgcaagaagaaagagttccgctgccataccgggcaatgcatccctgaagagtggcgctgtgacggacgtattcgggactgtccttcgggagaggacgaggaggactgtggatgcggtccgaatgaattccagtgcgacagcgggacgtgcattctggataccaagttctgtgacaatgtgattgactgtgatgatggtgggtccgatgaatcaagatgtccaatcattgatcctatacctgtatgcaaagcagctgggacggtcaagtgtatgtatggacaggtgtgtgctgtagtatgcaatggcatcagagagtgtccagtgaatggtgaagacgaagttgggtgtccagtgacgaactgtcagccttcagagtttgaatgccgagacggtcagtgtttaccggcttcggatatatgtgacggatacccgcattgctccggaggggaagatgagattgaatgtcctctgactaactgcttagcatccgagtttgaatgccgagatggtcagtgtttaccggcttcggatatatgtgacggatacccgcattgctccggaggggaagacgagattgaatgtcctctgactaactgcttagcatccgagtttgaatgccgagatggtcagtgtttaccggcttcggatatatgtgacggatacccgcattgttccggaggggaagacgagattgaatgtcctctgactaactgcttagcatccgagtttgaatgccgagatggtcagtgtttaccggcttcggatatatgtgacggatacccgcattgttccgaaggggacgacgagattgaatgtcctctgactaactgcttagcatccgagtttgaatgccgagatggtcagtgtttaccggcttcggatatatgtgacggatacccgcattgttccgaaggggaagacgagattggatgtcctctgactaactgcttagcatccgagtttgaatgccgagatggtcagtgtttaccggcttcggatatatgtgacggatacccgcattgttccgaaggggaagacgagattgaatgtcctctgactaactgcttagcatccgagtttgaatgccgagatggtcagtgtttaccggcttcggatatatgtgacggctacccgcattgctccgaaggggaagacgagattgaatgtcctctgactaactgcttagcatccgagtttgaatgccgagatggtcagtgtttaccggcttcggatatatgtgacggatacccgcattgttccggaggggaagacgagattgaatgtcctctgactaactgcttagcatccgagtttgaatgccgagatggtcagtgtttaccggcttcgaatatatgtgacggatacccgcattgttccaagggggaagatgaaagcgattgttcgctaccaattgtaccaactgaatctccgtatcctgtaacgagcccactctccatcgtatgtggactgccattgttttttgagtgtccggatggtacctgcatatcacgtgacctcctctgtaacggaaagcccgactgtccatatagcgacgcagatgagcaacctggtaactgtcggatcgtttctacatgtgaacctgatgagtttgagtgtgacgatgggagttgtatatattcagcgcttgtctgcaatgatcgagctgattgtactgatgagtcagatgaagcagtagaacgatgcggatttaatctatgtaattctgaagatggtttcagatgtcgagacggatcttgtatacctctgtaccaagtgtgtaatgacgtcatcgattgtcctgatggaggggatgaggatgactgtgctgcaatatatactagaccaggcatatgtcccgtacatcccaacatcgcatacggaggaaacaatatctgcgtcgacaactgttttcaagatacagactgccccgaaccaatgaaatgttgtccggcgccctctgcgtgcggcctaacatgtaccaacgtcttccttccttcaaaccctttgacaggtttggcagagctggcaaattttgttgagactcttcgtgatggcctagatattatcaataatgaagttgcaatcctgacagacgatgtggatgatatagaaacacgactgaagagccttgagacagatacgcgtctactgagacaggatgtggatatcctcaagcaacaggcaacagcgggtgacagaccacaagcaccagtttatcctgcaccatatgaatcagagcctaccacacagaaagtggtagagagctatgtcaaaccttaccagccgcaagatgttcagccttacaaaccagaagacgtgcaaccgtatgaaccagtaaccaaacgacctaacgaaccggaagaaccttacgagtcttataaaccagaagaaccgcaatatgttcaaccttctgaaccacaatatgtcagaccttacacaccagaaaacgttataacctatgaacaagaaacacccttgtcttataaaccacaagacgaaccagaaaccgtccgaccttacatcccgccacaagacgttaaaccatacgagccagaaaccgttcgtccttatgaaccagaagatatccaaccctacgaaacagaaacagcccaaccttacgaaccaccacaagatgaccaaccctacaaaccacctcaagatattagaccttacgaaccaccacaagatgttagaccttacgaaccaccacaagatgttaggccttacgaaccacctcaggatacaagaccatacgaacctccacaggatacaagaccatacgaacctccacaggatacaagaccttacgaaccacctcaggatacaagaccatacgaacctccacaggatacgagaccttacgagccgccgcaagataataaaccttacgaaccacctcaagatgttagaccttacgaaccacctcaagatgttaggccttacgaaccgcctcaggatacaagaccttacgaaccacctcaggatacaagaccatacgaaccacctcaggatacaagaccatacgaacctccacaggatatgagaccttacgagcc

SEQ ID NO: 199 - DNA, 1425 bp, Homo sapiens
  source 1..1425: mol_type = genomic DNA
gggggcggggctgcctgcggaaggggccgtgcgcgtggggtcgctccgcagctgcgagttcatggcgtcccggtgctccgagccctacccggaggtctccagaatccctaccgtcaggggatgcaacggctccctgtctggtgccctctcctgctgcgaggactcggcccagggctcgggcccgcccaaggcccctacggtggccgagggtcccagctcctgccttcggcggaacgtgatcagcgagagggagcgcaggaagcggatgtcgttgagctgtgagcgtctgcgggccctgctgccccagttcgatggccggcgggaggacatggcctcggtcctggagatgtctgtgcagttcctgcggcttgccagcgccctggggcccagtcaggagcagcacgctattcttgcttcctccaaggaaatgtggcactcgttgcaggaggatgttttacagttgacgttgtcgagtcagattcaagcaggtgtgccagaccctgggacgggagcgtccagcgggactcgaaccccagatgtgaaggcgtttctggaaagtccttggtccctggatccagcgtcggccagcccagagcccgtgccgcacatccttgcgtcctccaggcagtgggaccccgcgagctgcacgtccctgggcacggacaagtgtgaggcactgttggggctgtgccaggtgcggggtgggctgccccctttctcagaaccttccagcctggtgccgtggcccccaggccggagtcttcctaaggctgtgaggccacccctgtcctggcctccgttctcgcagcagcagaccttgcccgtgatgagcggggaggcccttggctggctgggccaggctgggcccctggccatgggggctgcacctctgggggagccagccaaggaggaccccatgctggcgcaggaggccgggtctgcgttggggtctgatgtggacgatgggacgtccttcctgctgactgctggtcccagctcgtggccggggtctctggagggtcgaggaggcagtggccctgcatgggccccagctgagagcagtccactggatgttggagagccaggcttcctaggggaccctgagcttggctcccaggagctccaggacagccctctggagccgtggggcctggatgtggactgtgcaggcctggccctgaaggacgaggtggagagcatcttccctgacttctttgcctgctagcagccaggctgtggagaggaggcgggcggggccggtggatctggagccgtgtgtgtccctgtcgcgtgcttgggcattttattttgggtttgggttgcagctgcaccctaatttgagcgaggcttacaggctgtgagaagaggatagtgaatattaaagagggaaagcagttttcctggaggaagcaaaaaaaaaaaaaa

SEQ ID NO: 200 - DNA, 1997 bp, Homo sapiens
  source 1..1997: mol_type = genomic DNA
gggggcggggctgcctgcggaaggggccgtgcgcgtggggtcgctccgcagctgcgagttcatggcgtcccggtgctccgagccctacccggaggtctccagaatccctaccgtcaggggatgcaacggctccctgtctggtgccctctcctgctgcgaggactcggcccagggctcgggcccgcccaaggcccctacggtggccgagggtcccagctcctgccttcggcggaacgtgatcagcgagagggagcgcaggaagcggatgtcgttgagctgtgagcgtctgcgggccctgctgccccagttcgatggccggcgggaggacatggcctcggtcctggagatgtctgtgcagttcctgcggcttgccagcgccctggggcccagtcaggagcagcacgctattcttgcttcctccaaggaaatgtggcactcgttgcaggaggatgttttacagttgacgttgtcgagtcagattcaagcaggtgtgccagaccctgggacgggagcgtccagcgggactcgaaccccagatgtgaaggcgtttctggaaagtccttggtccctggatccagcgtcggccagcccagagcccgtgccgcacatccttgcgtcctccaggcagtgggaccccgcgagctgcacgtccctgggcacggacaagtgtgaggcactgttggggctgtgccaggtgcggggtgggctgccccctttctcagaaccttccagcctggtgccgtggcccccaggccggagtcttcctaaggctgtgaggccacccctgtcctggcctccgttctcgcagcagcagaccttgcccgtgatgagcggggaggcccttggctggctgggccaggctgggcccctggccatgggggctgcacctctgggggagccagccaaggaggaccccatgctggcgcaggaggccgggtctgcgttggggtctgatgtggacgatgggacgtccttcctgctgactgctggtcccagctcgtggccgggtgagtggggccctgggttcagggctggtccccccgcgtaagcacctgatatgagctggggaattgggactcaggcctagcgtgtgtcagggggccccagggtctgtgtctgagcccccgttttctccaccgttggtgcttagctgttgggccgtgtctggtattgagcgttataggtgatatgtgagtgtgtgagtgaacgtgatgtggacgagcctgcatgagagctggcggtgcttggagccctgtattcttccccttgaccctgtgtcagcgaggcccctggtccagcccgtgctggccggcaaaggtgtatggccctgtgacatggcgtgtgtccattccatttaggatttagtgtttgggagcccgttcctggttctggtccaacaggtgtcctgggtctggggccaccaggtatgagctcacccacctcatcacagcctctgtgcagcggggacagggcagggcagacggactgaggtgggagctctgttcctccgaccccacctgtctgcctcaagctcccagagcacctgcctgccctgccgatgtgtcctgtttgcttccagggtctctggagggtcgaggaggcagtggccctgcatgggccccagctgagagcagtccactggatgttggagagccaggcttcctaggggaccctgagcttggctcccaggagctccaggacagccctctggagccgtggggcctggatgtggactgtgcaggcctggccctgaaggacgaggtggagagcatcttccctgacttctttgcctgctagcagccaggctgtggagaggaggcgggcggggccggtggatctggagccgtgtgtgtccctgtcgcgtgcttgggcattttattttgggtttgggttgcagctgcaccctaatttgagcgaggcttacaggctgtgagaagaggatagtgaatattaaagagggaaagcagttttcctggaggaagcaaaaaaaaaaaaaa

SEQ ID NO: 201 - DNA, 2125 bp, Homo sapiens
  source 1..2125: mol_type = genomic DNA
gccccaggacccagcacgtgcgcagcggccatggcttcctcaattatctgccaggagcactgccagatctcgggccaggcaaaaatagacatcttattagttggagatgtcactgtgggctacctggctgatactgtacagaaactatttgcaaacatagcagaagtcaccatcaccatcagtgacacgaaggaggcagcagcgcttttggatgattgcatattcaacatggttctcttgaaggtgccttcttcactaagtgccgaggagctggaagccatcaagttaattagatttggcaaaaagaaaaatacacattcactgtttgtttttataatccctgaaaattttaaaggttgtatttcagggcatggaatggatattgctttaactgaaccactgacaatggaaaaaatgagtaatgtggtaaaatactggacaacatgtccctcaaacactgttaagactgaaaacgcaactgggcctgaagaacttggattgcccctgcagaggtcctacagcgaacacctgggatattttcctactgatctatttgcctgctctgaatctttaaggaatggcaatgggcttgaattaaatgcttcgttgtcagagttcgagaaaaacaaaaagatctctcttcttcattcaagcaaggaaaaactaagaagggaaagaatcaaatattgctgtgagcagctgcgtactctcttgccgtatgtaaaagggagaaagaatgatgcggcttcagttcttgaggcaacagttgattatgtgaaatatatccgggagaaaatctctccagccgttatggcccagattacagaagcacttcagagcaacatgaggttttgtaagaaacaacaaacacccattgagctgtctctcccaggcactgtcatggcacagcgggaaaacagtgtgatgagcacttactcccctgagagagggctccaattcctgactaatacgtgctggaatgggtgctccactcctgatgcagagagctccttggatgaagctgtgagagttccatcaagctccgcctcagagaatgctattggtgatccatataaaactcacatttccagtgcagcgctgtctctgaattccttgcatactgtcagatattattctaaagtcaccccttcctacgatgcaactgctgtaacaaatcagaacatttcaattcatttaccttcagccatgcccccggtctcaaagcttctccctcggcactgcacttctgggttgggccagacgtgcactacacatcccaactgtctgcaacagttttgggcgtattaaaagcacatgtttgaaattcacactctcaaccacctactgggcgcagtttgacaatctaggaaaagtggaacaaagaatgattttgaaagctccacccaaagacctaatatcaaaagagttggcatggtttggcttctgataaatgcactcaaagcttctgcagatagaaagaccagcagcgaaaaagctggccacacactgtcactcatcttcatacacacttggatccccgccagccagagagctacaagaacaaatggcctcagtgacctacactctcttttctcaaaaaatattccacaatttatgaaaaaagcatgctataaggaagatccatgtagacacgataaaatgattagattgggaaggtgtgttgataccttgtgtcactgagtacagatattacaacttgattcttatttttagtatccctgtgaattactgtcactcatttctaggtggtcttttccttatttgacattttagagagtttccttcttcattcaccatccaaactaagatatgcagagagatgctgaaagaggggtttacctcctcacttgacaactaatgaataaattgatgtgtgcttttgcatttcacaatcccttgagtgaaacgatggctaataggtaaatatttctttctggaccttaagttacagactagcaggttttttgtttttcatctcttcctccctatgggtattagaaaggacagttgaaaataagggggaaaaaggtttgttttatatttcactgaattgttcttatatgtaagttttattattaaataaaatactcagttttcaccctga

SEQ ID NO: 202 - DNA, 1936 bp, Homo sapiens
  source 1..1936: mol_type = genomic DNA
ttagtgcagggggcgggcccgggacgcagcggctgtggagctcctcctgctgggaggctgccccaggacccagcacgtgcgcagcggccatggcttcctcaattatctgccaggagcactgccagatctcgggccaggcaaaaatagacatcttattagttggagatgtcactgtgggctacctggctgatactgtacagaaactatttgcaaacatagcagaagtcaccatcaccatcagtgacacgaaggaggcagcagcgcttttggatgattgcatattcaacatggttctcttgaaggtgccttcttcactaagtgccgaggagctggaagccatcaagttaattagatttggcaaaaagaaaaatacacattcactgtttgtttttataatccctgaaaattttaaaggttgtatttcagggcatggaatggatattgctttaactgaaccactgacaatggaaaaaatgagtaatgtggtaaaatactggacaacatgtccctcaaacactgttaagactgaaaacgcaactgggcctgaagaacttggattgcccctgcagaggtcctacagcgaacacctgggatattttcctactgatctatttgcctgctctgaatctttaaggaatggcaatgggcttgaattaaatgcttcgttgtcagagttcgagaaaaacaaaaagatctctcttcttcattcaagcaaggaaaaactaagaaggctgtacaggaagcatagcagcttctgtttctggtgagccctcaggaagcttacaatcatggcaggaggcaaagtggagccaatgtgtcacatagcaagaggaggagcaagagagagagaaaggagaggccccaaactcttttaaaccaccagatcttgcatgaactgagtgagaactcactcatcaccaaggggatggcgctaagctaagccctagagtgcccccatgatttaacacctcccaccaggttccacctccaacattgggcatcacatttcaccataagatttggaggggacaaaacatccaagccacatcagttatcaacccagcattgttatttgttttgcttaaacagtaagctgtcgcccagttatctaatactgtacaacagattactctgaaacttggtagtggaaatcaacaaactgtttatcatatctcatgattttgtgagtcaccagtttgggcagagcttggctctgtgattcttctcagtgtggtgttaaccatggcactccgtgatgttcagccagcaaaactggcctgtctggagattccagcgcagcgtcatccacacatgtggtcttctggtgggtgtggctgcaggttgtgctcaaatgggctgttcttccctgtggtctcatcacttctccacatggtatctccagcaagctagaaggacctcttacatgaaggcttaggattccatgagaccagtgtgaaagctacatcttctgaaatgctggtcccagaactgtcatagagtcactctccagatatcttttgattaaagcaggcacaggccagtgaagattcaagaggagaggaaatggaccctgactctttgttggagaaataagtaattttcagtgactttaatcttaactcttatctttttaacccaaatttcagattcttgtttgcagtagaacaggctcttcactgtatacaagattttgtctgagttgcaaaaattctctccccatgaatttccctgtattaccatcttttgctcctgcatttccccactcagtcttggctgccacaatcaaagggacataaagtacaaggacacttttttcttgcctctgtagtagaaatcttagcagtatacagctgctctaggcctgtcaaataaatatatactattggtttttaaaacattaataaattagaaaactaccctttaatgtatgccacca

SEQ ID NO: 203 - DNA, 1394 bp, Homo sapiens
  source 1..1394: mol_type = genomic DNA
ttaaggaggtgcagtcttatgggagggacaggggcggagtcagtctttaaaagctgttcccaggtctggcccgcctgccacaaacgctgagcccaggtgggagaggtctggcctatccgcgcctggcagctgtcggaactccggagaccacaaaggggtttatggtttaccccctccacggaaggtcggtctgatcgcagctgcgggtcggggagagggaccgggggtcccccagtcagtaggcctcagaacacctcttcagtgccggggcaccagacagcggattttgcattcgactctccccaaagtgtgccgaacaggttggaagcaaaggctccggtttaagctctgggcttggggataaaatacactttttaaggacccaagttcctcggcaacgactccagactgggaagacctttccattttcaggatcgacgcttcacgttgaggggagggcattcaggacgccctcttaaggcttctcccaacccatggcgctaccaggctcctcacaggaccaggcctggagcctggagcctccggctgccacggctgctgcctcctcatcttcgggaccccaggagcgggagggcgctgggagccccgcggcccccgggacgctgcccctggagaaggtgaagcggccgatgaacgcgttcatggtgtggagctccgctcagcgccgccagatggcgcagcagaaccccaagatgcacaactccgagatctccaagcgcctgggcgcgcagtggaagctgctggacgaggacgagaagcggcccttcgtggaggaggccaagcggctccgcgcccgacacctgcgcgactaccccgactacaagtaccggcctcggcgcaaggccaagagctcgggcgccggaccttcccgctgcggacagggaagaggcaacctggccagcggcggcccgctctgggggccggggtacgcgaccacccaaccgagcagaggctttgggtacagaccccccagctactcgacagcctacctgcctggcagctatggctcttcccactgcaaactggaagccccctcaccgtgctccctccctcagagtgaccctaggctccagggggaactgctgcccacctatacccactacctgccccctggctctcccactccatacaaccctccccttgctggtgcccccatgcccctaacccacctctaaccctcatggacgcagacctcacgggacgggcctcatcctccttttttaatccagcagcatcccctaccccaggctgtcaaccctttctcctgttggactacagttcagaggcagcctgcagtcctcccatgatagccagggagagccgcacaacatacaattatatttttggtagtattaaacagttttgtattattc

SEQ ID NO: 204 - DNA, 3283 bp, Homo sapiens
  source 1..3283: mol_type = genomic DNA
attgtcgcagctccgggtgggggagggatgactaaagacaacggctgtaagagaactccacaagagagtcagaacgaaaatgtgcaacaagtgcggcggctcctaccatggcaggtgattcgaggactcagcacgaggcgagagtagggaccaggaagagccggaaaacccgcctgtgattggccgtccacgggtatcggtcgttgtgattgggtgaggcccagacagacagctgcgttttgaaccgcgtagggttctgggtagcaaaggccttgcaaggctcttaaccgaaagggggagggggaaggtcgccaacaaacggctgagctcacaatcctggccggggcgtccccctcccccatggagagagccagacccgagccgccgcctcagccgcgcccgttgcgtcccgctccgcccccgctgccggtcgagggcacctccttttgggcagcagccatggagccccctccgtcgtctcccacactgagcgcggcagccagtgcgaccttggcctcgtcgtgcggggaggcagtggcgtccggcttacagcccgcggtgcggcggctgctgcaggtgaagccagagcaggtgttgctgctaccacagcctcaggcccagaacgaggaagccgctgcctcgtccgcgcaggcgcggctgttgcagttcaggcccgacctgcggctcctgcagccgccgacagcgtcagacggcgccacctccaggcccgagttgcacccggtgcagcccctggcgctgcatgtcaaggccaagaagcagaagctggggcccagcctggatcagtcagtggggcctcgaggggccgtcgaaaccggtcctagagcctccagggtggtcaagttggaaggccccgggccggccctcggctacttccgaggggacgagaagggcaagctggaggcggaggaggtcatgagagactcgatgcaaggcggggcaggcaaaagcccggcagccatccgagaaggtgtgatcaaaacggaggaacccgagagactcctcgaggactgcaggctcggcgcggagcccgcgtccaatggcctggttcatggcagcgcggaggtcatcttggccccaacgtccggtgcctttgggccgcaccagcaagaccttaggatccctttgacgctccacacggtcccccctggggcccggatccagtttcagggagctccgccttcagagctgataagattgaccaaggtccccctgacaccagtgcctactaaaatgcagtccctactggagccttctgtaaaaattgaaaccaaagatgtcccgctcaccgtgttgccctcagatgcaggcataccagatactcccttcagtaaggacagaaatggtcatgtgaagcgacccatgaacgcatttatggtttgggcaaggatccaccgaccagcactagccaaagctaacccagcagccaacaatgcagaaatcagtgtccagcttgggttagagtggaacaaacttagtgaagaacaaaagaaaccctattacgatgaagcacaaaagattaaggaaaagcacagagaggaatttcctggttgggtttatcagcctcgtccagggaagcgaaaacgattccctctaagtgtttccaatgtattttctggtaccacacagaatatcatctctacaaatcctacaacagtttatccttaccgctcacctacgtactctgtggtaattcccagcctacagaatcccatcactcatccagttggtgaaacctcacctgctatccagctgcccacacctgcagtccagagcccaagccctgtcacacttttccagcccagcgtctccagtgctgctcaggtggctgtccaggatccaagtctacctgtctatccagcactcccaccccaacgctttactgggccttcccaaacagacactcatcagctgcattctgaagccactcacactgtgaagcaacccactcctgtctctctagagagcgccaacaggatttcaagtagtgcaagtactgcccatgccagatttgcaacttcgaccatccaacctcctagggagtattccagcgtttccccttgtcccagaagtgctccaatcccccaggcttctcccattccacacccacatgtctaccagccccctccccttggccatccagccacactgttcgggacaccaccaagattctcttttcatcacccttacttcctacccggacctcactacttcccatcaagtacatgcccttacagtcggcctccctttggctatggaaattttccgagttcaatgccagaatgccttagttattatgaagacaggtacccaaaacatgagggtatcttttcaactttaaatagagactattcttttagagactactcaagtgaatgcacacacagtgaaaattctcggagttgtgagaacatgaatggaacttcttactataacagtcatagccacagtggggaagaaaacttaaaccctgtgcctcagctggacattggaaccttggagaatgtcttcacagccccgacatcaactccttctagcatccagcaagtcaatgtcaccgacagtgatgaggaggaagaagaaaaagtgctcagggatttataattttaaaacaaatatgcacagaaaataaacatttcttaaaatatattctgggtcagttggtatgagaaaaaaaaaagcctagaattctttgttgaaagttttcagtcgtgatttgaggagttaaaaccaaatgcaatttatgtcttcataaaattttgattagtgaaactagagtctggatgtttcattgtaggaatatttaagttattaagtagtttaattttaatggctgaaatttgcatcaacatgtattattattactttatcctggaacatgcaaaatactgaagcctcacagttgtatgtgaggggaaaggggaaataaatctagcatagtgtgatttttattttatctcaggatacattttttaaatgattttttgtttgctttttatgtaatacttatggatgttgtcaatttttgatgtaacattttgaaagtattttgacaactcctagtgaacttggacttggttgctaaatttaacttacactaataaccaattataagttccaaatgtgttttaatggcacctgggtgattcttcagctaaatttagtcatttctgtttctaaatatttttatcattttaaaatattttttttccatttggcatacatcgttctttgttgtaattaaataaacatagataaaattgtt

SEQ ID NO: 205 - DNA, 2787 bp, Homo sapiens
  source 1..2787: mol_type = genomic DNA
gggggagggatgactaaagacaacggctgtaagagaactccacaagagagtcagaacgaaaatgtgcaacaagtgcggcggctcctaccatggcaggtgattcgaggactcagcacgaggcgagagtagggaccaggaagagccggaaaacccgcctgtgattggccgtccacgggtatcggtcgttgtgattgggtgaggcccagacagacagctgcgttttgaaccgcgtagggttctgggtagcaaaggccttgcaaggctcttaaccgaaagggggagggggaaggtcgccaacaaacggctgagctcacaatcctggccggggcgtccccctcccccatggagagagccagacccgagccgccgcctcagccgcgcccgttgcgtcccgctccgcccccgctgccggtcgagggcacctccttttgggcagcagccatggagccccctccgtcgtctcccacactgagcgcggcagccagtgcgaccttggcctcgtcgtgcggggaggcagtggcgtccggcttacagcccgcggtgcggcggctgctgcaggtgaagccagagcaggtgttgctgctaccacagcctcaggcccagaacgaggaagccgctgcctcgtccgcgcaggcgcggctgttgcagttcaggcccgacctgcggctcctgcagccgccgacagcgtcagacggcgccacctccaggcccgagttgcacccggtgcagcccctggcgctgcatgtcaaggccaagaagcagaagctggggcccagcctggatcagtcagtggggcctcgaggggccgtcgaaaccggtcctagagcctccagggtggtcaagttggaaggccccgggccggccctcggctacttccgaggggacgagaagggcaagctggaggcggaggaggtcatgagagactcgatgcaaggcggggcaggcaaaagcccggcagccatccgagaaggtgtgatcaaaacggaggaacccgagagactcctcgaggactgcaggctcggcgcggagcccgcgtccaatggcctggttcatggcagcgcggaggtcatcttggccccaacgtccggtgcctttgggccgcaccagcaagaccttaggatccctttgacgctccacacggtcccccctggggcccggatccagtttcagggagctccgccttcagagctgataagattgaccaaggtccccctgacaccagtgcctactaaaatgcagtccctactggagccttctgtaaaaattgaaaccaaagatgtcccgctcaccgtgttgccctcagatgcaggcataccagatactcccttcagtaaggacagaaatggtcatgtgaagcgacccatgaacgcatttatggtttgggcaaggatccaccgaccagcactagccaaagctaacccagcagccaacaatgcagaaatcagtgtccagcttgggttagagtggaacaaacttagtgaagaacaaaagaaaccctattacgatgaagcacaaaagattaaggaaaagcacagagaggaatttcctggttgggtttatcagcctcgtccagggaagcgaaaacgattccctctaagtgtttccaatgtattttctggtaccacacagaatatcatctctacaaatcctacaacagtttatccttaccgctcacctacgtactctgtggtaattcccagcctacagaatcccatcactcatccagttgtacatgcccttacagtcggcctccctttggctatggaaattttccgagttcaatgccagaatgccttagttattatgaagacaggtacccaaaacatgagggtatcttttcaactttaaatagagactattcttttagagactactcaagtgaatgcacacacagtgaaaattctcggagttgtgagaacatgaatggaacttcttactataacagtcatagccacagtggggaagaaaacttaaaccctgtgcctcagctggacattggaaccttggagaatgtcttcacagccccgacatcaactccttctagcatccagcaagtcaatgtcaccgacagtgatgaggaggaagaagaaaaagtgctcagggatttataattttaaaacaaatatgcacagaaaataaacatttcttaaaatatattctgggtcagttggtatgagaaaaaaaaaagcctagaattctttgttgaaagttttcagtcgtgatttgaggagttaaaaccaaatgcaatttatgtcttcataaaattttgattagtgaaactagagtctggatgtttcattgtaggaatatttaagttattaagtagtttaattttaatggctgaaatttgcatcaacatgtattattattactttatcctggaacatgcaaaatactgaagcctcacagttgtatgtgaggggaaaggggaaataaatctagcatagtgtgatttttattttatctcaggatacattttttaaatgattttttgtttgctttttatgtaatacttatggatgttgtcaatttttgatgtaacattttgaaagtattttgacaactcctagtgaacttggacttggttgctaaatttaacttacactaataaccaattataagttccaaatgtgttttaatggcacctgggtgattcttcagctaaatttagtcatttctgtttctaaatatttttatcattttaaaatattttttttccatttggcatacatcgttctttgttgtaattaaataaacatagataaaattgttaaaaaaaaaaaaaaa

SEQ ID NO: 206 - DNA, 2177 bp, Homo sapiens
  source 1..2177: mol_type = genomic DNA
atattggctgcggggaaggggacgggggctgttggacatgcgtgcagagtccggcggccacggacgcggtaatattgtccctcggcatccgccgtggtgagacccggcgcgttgctgtgaagacggacgggtctggaagaagtggggtgcggtcatggagaaatgttgtagagggaaggaacaaagtctactgtgcatccagcaaggcataccagatactcccttcagtaaggacagaaatggtcatgtgaagcgacccatgaacgcatttatggtttgggcaaggatccaccgaccagcactagccaaagctaacccagcagccaacaatgcagaaatcagtgtccagcttgggttagagtggaacaaacttagtgaagaacaaaagaaaccctattacgatgaagcacaaaagattaaggaaaagcacagagaggaatttcctggttgggtttatcagcctcgtccagggaagcgaaaacgattccctctaagtgtttccaatgtattttctggtaccacacagaatatcatctctacaaatcctacaacagtttatccttaccgctcacctacgtactctgtggtaattcccagcctacagaatcccatcactcatccagttggtgaaacctcacctgctatccagctgcccacacctgcagtccagagcccaagccctgtcacacttttccagcccagcgtctccagtgctgctcaggtggctgtccaggatccaagtctacctgtctatccagcactcccaccccaacgctttactgggccttcccaaacagacactcatcagctgcattctgaagccactcacactgtgaagcaacccactcctgtctctctagagagcgccaacaggatttcaagtagtgcaagtactgcccatgccagatttgcaacttcgaccatccaacctcctagggagtattccagcgtttccccttgtcccagaagtgctccaatcccccaggcttctcccattccacacccacatgtctaccagccccctccccttggccatccagccacactgttcgggacaccaccaagattctcttttcatcacccttacttcctacccggacctcactacttcccatcaagtacatgcccttacagtcggcctccctttggctatggaaattttccgagttcaatgccagaatgccttagttattatgaagacaggtacccaaaacatgagggtatcttttcaactttaaatagagactattcttttagagactactcaagtgaatgcacacacagtgaaaattctcggagttgtgagaacatgaatggaacttcttactataacagtcatagccacagtggggaagaaaacttaaaccctgtgcctcagctggacattggaaccttggagaatgtcttcacagccccgacatcaactccttctagcatccagcaagtcaatgtcaccgacagtgatgaggaggaagaagaaaaagtgctcagggatttataattttaaaacaaatatgcacagaaaataaacatttcttaaaatatattctgggtcagttggtatgagaaaaaaaaaagcctagaattctttgttgaaagttttcagtcgtgatttgaggagttaaaaccaaatgcaatttatgtcttcataaaattttgattagtgaaactagagtctggatgtttcattgtaggaatatttaagttattaagtagtttaattttaatggctgaaatttgcatcaacatgtattattattactttatcctggaacatgcaaaatactgaagcctcacagttgtatgtgaggggaaaggggaaataaatctagcatagtgtgatttttattttatctcaggatacattttttaaatgattttttgtttgctttttatgtaatacttatggatgttgtcaatttttgatgtaacattttgaaagtattttgacaactcctagtgaacttggacttggttgctaaatttaacttacactaataaccaattataagttccaaatgtgttttaatggcacctgggtgattcttcagctaaatttagtcatttctgtttctaaatatttttatcattttaaaatattttttttccatttggcatacatcgttctttgttgtaattaaataaacatagataaaattgttaaaaaaaaaaaaaaa

SEQ ID NO: 207 - DNA, 1840 bp, Homo sapiens
  source 1..1840: mol_type = genomic DNA
ggcgtggcacgccgcccgctcagaaagcgcgggaaaggcacgcagccacgccccaagggcgcagcctaggacaggggcttctggagcttctggcagccgtctgccctcatggcctttgcacctatggggcccgaggcctcgttcttcgacgttttggaccgacacagggagtccctgctggctgccctgaggagaggtggcagggagcccccaactgggggaagccgcctggcctccagttctgaggttcttgcatctatagaaaatattatccaagacataatcacaagcttggcaagaaatgaagcacctgcattcacgatagacaacagatcaagctgggaaaacataaagtttgaagattctgtgggtcttcagatggtatcccattgcaccaccagaaagatcaaaagtgattcaccaaaatcagctcaaaaattttctctaatccttaaaatattgtccatgatttataaattagtacagagcaacacttatgcaaccaaaagggacatatattacactgacagtcaactctttggtaaccagactgtcgtcgacaatattatcaatgacatttcttgcatgttaaaagtgtcaaggaggagtctacatatattatctacatcaaaaggtttaattgctggcaacttaagatacatcgaggaagatggcaccaaagtgaattgtacctgtggtgcaacggctgttgctgtgccatcgaatattcaaggaattcggaatttagttacagatgcaaagtttgtattaattgtagaaaaagatgcaacatttcagcggctcctagatgacaacttttgcaacaaattgtctccttgcatcatgattacgggaaagggagttcctgatctaaacacaagacttttagtcaagaaactgtgggatacatttcatgttcctgttttcactcttgtagatgctgatccacatggcatagaaataatgtgcatctataagtatggatctatgtctatgtcttttgaagctcatcatctcacagttccagctattagatggcttggtcttctcccttctgatcttaaaagattaaatgtacctaaagatagtttgattccactgacaaaaagggaccaaatgaaacttgacagtatcctgaggagaccttatgttacctgccaaccattttggagaaaagaaatggaaataatggcagactctaaaatgaaggcagaaattcaagctttgactttcctatcatcagattatctttccagagtgtacttacctaacaaattaaaatttggaggatggatataaaaataaatcagaagaactctgattgccagaggcttttcattaattttgttttgattggcaaatactattgtggaaagaacatatattatattcttaattctgtaaaagtgaaataaaataactttccgttaattatatatttttgtcaaaacaaatgctgtactccaattttctttgcaaggccttattcttgcctctatagagacagatttctgtcctatcctctaaagcaaattataaaagaacatgttattttgacctttaaattatttttgaaaaaataatattttatacatgtcatcaaagtctacaaaatatttaccttctacgatacaactaatgttaacgcataaagtatcttactggtaacaaaaatcataatgatctgaatttgagatgttgcaaatgaattgtggtgtccggtagtttcttcttacattttcctttgcctttatactttaggggtcttactccattaattcatttgttacattagtaaaattcagtatgaataaatatttggactaaaaaaaaaaaaaaa

SEQ ID NO: 208 - DNA, 7680 bp, Homo sapiens
  source 1..7680: mol_type = genomic DNA
acccccccctccctgtccggtccgggttcgcttgcctcgtcagcgtccgcgtttttcccggccccccccaacccccccggacaggacccccttgagcttgtccctcagctgccaccatgagcgaccaagatcactccatggatgaaatgacagctgtggtgaaaattgaaaaaggagttggtggcaataatgggggcaatggtaatggtggtggtgccttttcacaggctcgaagtagcagcacaggcagtagcagcagcactggaggaggagggcaggagtcccagccatcccctttggctctgctggcagcaacttgcagcagaattgagtcacccaatgagaacagcaacaactcccagggcccgagtcagtcagggggaacaggtgagcttgacctcacagccacacaactttcacagggtgccaatggctggcagatcatctcttcctcctctggggctacccctacctcaaaggaacagagtggcagcagtaccaatggcagcaatggcagtgagtcttccaagaatcgcacagtctctggtgggcagtatgttgtggctgccgctcccaacttacagaaccagcaagttctgacaggactacctggagtgatgcctaatattcagtatcaagtaatcccacagttccagaccgttgatgggcaacagctgcagtttgctgccactggggcccaagtgcagcaggatggttctggtcaaatacagatcataccaggtgcaaaccaacagattatcacaaatcgaggaagtggaggcaacatcattgctgctatgccaaacctactccagcaggctgtccccctccaaggcctggctaataatgtactctcaggacagactcagtatgtgaccaatgtaccagtggccctgaatgggaacatcaccttgctacctgtcaacagcgtttctgcagctaccttgactcccagctctcaggcagtcacgatcagcagctctgggtcccaggagagtggctcacagcctgtcacctcagggactaccatcagttctgccagcttggtatcatcacaagccagttccagctcctttttcaccaatgccaatagctactcaactactactaccaccagcaacatgggaattatgaactttactaccagtggatcatcagggaccaactctcaaggccagacaccccagagggtcagtgggctacaggggtctgatgctctgaacatccagcaaaaccagacatctggaggctcattgcaagcaggccagcaaaaagaaggagagcaaaaccagcagacacagcagcaacaaattcttatccagcctcagctagttcaagggggacaggccctccaggccctccaagcagcaccattgtcagggcagacctttacaactcaagccatctcccaggaaaccctccagaacctccagcttcaggctgttccaaactctggtcccatcatcatccggacaccaacagtggggcccaatggacaggtcagttggcagactctacagctgcagaacctccaagttcagaacccacaagcccaaacaatcaccttagccccaatgcagggtgtttccttggggcagaccagcagcagcaacaccactctcacacccattgcctcagctgcttccattcctgctggcacagtcactgtgaatgctgctcaactctcctccatgccaggcctccagaccattaacctcagtgcattgggtacttcaggaatccaggtgcacccaattcaaggcctgccgttggctatagcaaatgccccaggtgatcatggagctcagcttggtctccatggggctggtggtgatggaatacatgatgacacagcaggtggagaggaaggagaaaacagcccagatgcccaaccccaagccggtcggaggacccggcgggaagcatgcacctgcccctactgtaaagacagtgaaggaaggggctcgggggatcctggcaaaaagaaacagcatatttgccacatccaaggctgtgggaaagtgtatggcaagacctctcacctgcgggcacacttgcgctggcatacaggcgagaggccatttatgtgtacctggtcatactgtgggaaacgcttcacacgttcggatgagctacagaggcacaaacgtacacacacaggtgagaagaaatttgcctgccctgagtgtcctaagcgcttcatgaggagtgaccacctgtcaaaacatatcaagacccaccagaataagaagggaggcccaggtgtagctctgagtgtgggcactttgcccctggacagtggggcaggttcagaaggcagtggcactgccactccttcagcccttattaccaccaatatggtagccatggaggccatctgtccagagggcattgcccgtcttgccaacagtggcatcaacgtcatgcaggtggcagatctgcagtccattaatatcagtggcaatggcttctgagatcaggcacccggggccagagacatatgggccataccccttaaccccgggatgcaaggtagcatgggtccaagagacatggaagagagagccatgaagcattaaaatgcatggtgttgagaagaatcaggagagggatacaagagaggagatggggtcccggcacccatctgtatcatcagtgcctctttgaaggtgggaaacattagtgaaaattctgttggtgccacgctttgatgagcatttgtttgaccccagtttcttcttacacttcttaccccagcctacccttcctgcatttctcttctcagctcttccatgatggattcccccccctttcctaaagccatcatgccttgataaatatatatgatcattgaaatactttttaacaaaaaacagattctatattattatatatatatatatatatataaagatatatagagatgcattcacaggggttggctgggaggaggaagaccattctgtgaccaaaataccttggtcattttttttatattgccttatttccctatggctgagccttgttgtgacacatcaagcttttctgtagatgttgtcttggcttcccaccagcttaagcgttcatatgctctgcttttagttcatatatacatacataatgtttttcctttcttaattttgtctttttgtttgggatcagcttcttgcactccttccctaactcaactgttgccgtctcatcttctctcatctgatcacttcatgttttgtttttgttactgcctggatgaggcacttctgtcaattttttcaggaccttagttccagcagcagaatggaaaaatccttgaagcccaggctgatgcttgaagtaactgtggagggagtgttcaaaatactactgacgcaggcaccttcttggcgctggagagtcaaaggcatctcccttcattagctgctctgagcatcaagaattagaagtctttcagtggaattgtacaagagtccctttgaagataataatcttggctcagtttgtataaactgtcaaattttcaaataataggtagggggctttcactaggaaaatcatgtgctcagaagaggaaatgactcgtagtcaggttcaggagttagtggagtatttggactttggtactgctgtcttccaaggtagctctaagttttgatgtgtgggcttctgagtttatattctgaaaggaaatacacttcttttgaacatccccactaggttcttttccattgtcaataaggagcatcagccagtgaatctgtttcaggtttccattctgcagaactcctccaaagcatgtgctagtggcaagacagtggttcttatgatgttttcccttaacttttccttgtatgttcttgggtggttcctaagggaaagggaagcacatgatcatgggaatgatagcccagaacaaaaagaaatcttgtcttaccacagtgttttataggagagattgggagaaatcatcctgttttctctgtgacctgatttcagaagagactgatccaaaaattataacggcagggaacctagtgcatttggcactgagatttaaatgcaaccagaattgtcctcaaggcccagccataaaagcattgtctctctcgaccttctggtatcttgttagagagcttttcactgtgaggaagtgtggaaaaatagctctgtgtgtgtgtgtgtgtgtgtgtgtgtgtgtgtgtgtaatctgttaggttggggataggttttctgctagccaatattaaaagagacctgcaataaaaaaattaccctgatctgatagaaagcaagtgtttttgtatgtgtgggtgaatgtgtgttcatgcccgtatatgtctacacacagatgacaaattatatttgaaatcgttggaaaataaattcagatcaaaatgcctttcaggcccattacctagaaatctatcttaaaacctgggtatgttcctaaggtcatttctttgcttatgctaaattaattacaattatgaatggaggatattctactgtacttttttaaaaagaaactatttttgtgtttgaaagtgaaaccaacatccagatctatagcagagtccttattcttctcataaatctttttactttggctacaaatagatgatggtatgattctattatatattttatataaaatccatccaaattaagttttgggtaagtgtgttgtttaatctgaactatagtaacttaatactctaaacaatagttcactccatttggtcctttctccacagatgtaattatgttttcaactcaggaactatggcaaggaactttccccagatcaaattctattaacgctgagatacaagtcatccatgcacagccactatcataccctttattctcactgaaaggcagaactcagaacctgttattttatgtctgtaatcatgtactttggcatcttttggaggaaaggggcaggataactcactggaatgtacagtattttgctagtgcatttcaaggaatggaatcttctccagtatgaaattaccagatataaaataatgtaatgatgctgaggatataagcttttagaaggtaatttgatggtatttctttctcgaatgaaaagctgctggtttaccctcaaccctattcattagcattaccatgagtgaatttatatctaattatttccacttgccctgttctcttcacaccaaggaagctccagatccagtatcttgtttggcctcaaaacagaagcagcttcttttgtctcccagcagtagtgagccactcagtctcttccacaggaagtttggagcctacattccttgagtcaggagcttattacagaaaaaccccgtttccctgaacttttggctaacagaaattaatttaactgacatgcatattgattctgaaatttttttcctaagtttttttcatttttttgaatgagttttttaaattttttagatgaccaaaacttgcagggcaggggatgcccagaagagtggtgagatagtaaaacacttattccctcatcctttcaggttttcaggttgcccatttatattcatttacatgtcatttgactgtctcactttttacccagaacagtaacaacccacaccgtcttccttcagggatttccaactggcactctgtgggtgctacacagaatgcaatttaatggatatttctcagcctggttcagaataaattgatcctttgatcccagaaagtatatactgaagtgtgggataaagattatgattaggggagggttggagacaaaagctgtaaattactatggctgatttatttctactatatacatatatattttttgcttttgtatatcctatataggaaactaagcattgtattttttttaacaaatctaaaaaagcactatgaactacaggtgtttgactttcaaaatatattttgtattgttaatatcttcacattgtgtgaatactggaagctgcagatctttgctaggacgcaataaatttatatactttttgaggggttcttctggggtgctaatcaggcccctgttatgcttagggggagccctggtgctacttgcttgaagttttcagtgtaagtaccctgatgccttttggaccttgggatcagatcaagagttttggagatcaggtaccaaggaaataaggacagtctagctgcctcaagtgaggggccctttgcatagctctccttccccctcactgaagctgggtagcctattggggttgagagggaaaatgtgaaatctcagaatttatctcccttagaagagagccagtaacttatgtacaaggatgaaagaaaggtcgcagcagtagctttggggaaagggaggaagatatggcacttctccaaccccggaaaacattgcttttgaaaactgctgataaaatatgagccggttattacttctgtttgggagactgtgctctctgtggtgcctctcttggctctactccacagataccagacctcttctaagaggatgagcagaccagctttgaggttgacctgtttctctttgtctgccttcccaaaacaccagcccccaggaagacattaagcagccttaagcttaaattcctactccctcttccaaatttggctcacttgccttagatccaaggcagggaaaggaaaagaaggggggtctctggctttattactcccctaagtctttactctgacttccccaaacccagaaagattttctccacagtgttcatttgaaagaggagtattttgtcccattttccccttcctcattatcaaacagccccagtcttccttgtctctgctaagaaagtagaggcatgatgatctgcctctcaactgccctaagtcctagctaagtatcaggggaaaaaaaaaaaaaaaaagcctaacaaatgggattagactagggctgcaagtagtgaggattttgttgatacctctgctgggatgtgtgctttcccatatcttgccttcaggaattacactgtgccttttccccagggatatgggctctgtctacccagtgctccagtttcccggtaactgctcttgaacattgtggacaagggcaggtcttcatatttttgatcatccctttctcccagtgaaatcccatagcccttacctagagtctagggcacaaagacttcggggaagatacactgagattgacctgaggagacatctacacacaccagtggcagctgccccagggcctgcttccccttcctaagtctgtcatcctctggaagggatgggtggtgctccaatctctggtgcctaaaaacccaagtttatttctctcttaacactggcaataaccagtccacaccactgttgccttttaaaacctcttaataatctcatgctgtgtttgttttgattccaatccaattatcaccagggctgtgtgggtaaatgcttttaaatgctctctcatcttgttcttccccctcaccccccactcttaggtatgtatgatgctaatcttgtccctaagtaagtttcttcctgctccttttgtatcttcctttcttgtctttcctcctaccttttgtctcttggtgttttgggacttttttttttttttttttggccttttgtacaaagattagtttcaatgtagtctgtagcctcctttgtaaaccaattaaaaagttttttaataaaaaa

SEQ ID NO: 209 - DNA, 7614 bp, Homo sapiens
  source 1..7614: mol_type = genomic DNA
aggccccgcccgggccaaccgcctgcctggtccgccctctgaccaagatcactccatggatgaaatgacagctgtggtgaaaattgaaaaaggagttggtggcaataatgggggcaatggtaatggtggtggtgccttttcacaggctcgaagtagcagcacaggcagtagcagcagcactggaggaggagggcaggagtcccagccatcccctttggctctgctggcagcaacttgcagcagaattgagtcacccaatgagaacagcaacaactcccagggcccgagtcagtcagggggaacaggtgagcttgacctcacagccacacaactttcacagggtgccaatggctggcagatcatctcttcctcctctggggctacccctacctcaaaggaacagagtggcagcagtaccaatggcagcaatggcagtgagtcttccaagaatcgcacagtctctggtgggcagtatgttgtggctgccgctcccaacttacagaaccagcaagttctgacaggactacctggagtgatgcctaatattcagtatcaagtaatcccacagttccagaccgttgatgggcaacagctgcagtttgctgccactggggcccaagtgcagcaggatggttctggtcaaatacagatcataccaggtgcaaaccaacagattatcacaaatcgaggaagtggaggcaacatcattgctgctatgccaaacctactccagcaggctgtccccctccaaggcctggctaataatgtactctcaggacagactcagtatgtgaccaatgtaccagtggccctgaatgggaacatcaccttgctacctgtcaacagcgtttctgcagctaccttgactcccagctctcaggcagtcacgatcagcagctctgggtcccaggagagtggctcacagcctgtcacctcagggactaccatcagttctgccagcttggtatcatcacaagccagttccagctcctttttcaccaatgccaatagctactcaactactactaccaccagcaacatgggaattatgaactttactaccagtggatcatcagggaccaactctcaaggccagacaccccagagggtcagtgggctacaggggtctgatgctctgaacatccagcaaaaccagacatctggaggctcattgcaagcaggccagcaaaaagaaggagagcaaaaccagcagacacagcagcaacaaattcttatccagcctcagctagttcaagggggacaggccctccaggccctccaagcagcaccattgtcagggcagacctttacaactcaagccatctcccaggaaaccctccagaacctccagcttcaggctgttccaaactctggtcccatcatcatccggacaccaacagtggggcccaatggacaggtcagttggcagactctacagctgcagaacctccaagttcagaacccacaagcccaaacaatcaccttagccccaatgcagggtgtttccttggggcagaccagcagcagcaacaccactctcacacccattgcctcagctgcttccattcctgctggcacagtcactgtgaatgctgctcaactctcctccatgccaggcctccagaccattaacctcagtgcattgggtacttcaggaatccaggtgcacccaattcaaggcctgccgttggctatagcaaatgccccaggtgatcatggagctcagcttggtctccatggggctggtggtgatggaatacatgatgacacagcaggtggagaggaaggagaaaacagcccagatgcccaaccccaagccggtcggaggacccggcgggaagcatgcacctgcccctactgtaaagacagtgaaggaaggggctcgggggatcctggcaaaaagaaacagcatatttgccacatccaaggctgtgggaaagtgtatggcaagacctctcacctgcgggcacacttgcgctggcatacaggcgagaggccatttatgtgtacctggtcatactgtgggaaacgcttcacacgttcggatgagctacagaggcacaaacgtacacacacaggtgagaagaaatttgcctgccctgagtgtcctaagcgcttcatgaggagtgaccacctgtcaaaacatatcaagacccaccagaataagaagggaggcccaggtgtagctctgagtgtgggcactttgcccctggacagtggggcaggttcagaaggcagtggcactgccactccttcagcccttattaccaccaatatggtagccatggaggccatctgtccagagggcattgcccgtcttgccaacagtggcatcaacgtcatgcaggtggcagatctgcagtccattaatatcagtggcaatggcttctgagatcaggcacccggggccagagacatatgggccataccccttaaccccgggatgcaaggtagcatgggtccaagagacatggaagagagagccatgaagcattaaaatgcatggtgttgagaagaatcaggagagggatacaagagaggagatggggtcccggcacccatctgtatcatcagtgcctctttgaaggtgggaaacattagtgaaaattctgttggtgccacgctttgatgagcatttgtttgaccccagtttcttcttacacttcttaccccagcctacccttcctgcatttctcttctcagctcttccatgatggattcccccccctttcctaaagccatcatgccttgataaatatatatgatcattgaaatactttttaacaaaaaacagattctatattattatatatatatatatatatataaagatatatagagatgcattcacaggggttggctgggaggaggaagaccattctgtgaccaaaataccttggtcattttttttatattgccttatttccctatggctgagccttgttgtgacacatcaagcttttctgtagatgttgtcttggcttcccaccagcttaagcgttcatatgctctgcttttagttcatatatacatacataatgtttttcctttcttaattttgtctttttgtttgggatcagcttcttgcactccttccctaactcaactgttgccgtctcatcttctctcatctgatcacttcatgttttgtttttgttactgcctggatgaggcacttctgtcaattttttcaggaccttagttccagcagcagaatggaaaaatccttgaagcccaggctgatgcttgaagtaactgtggagggagtgttcaaaatactactgacgcaggcaccttcttggcgctggagagtcaaaggcatctcccttcattagctgctctgagcatcaagaattagaagtctttcagtggaattgtacaagagtccctttgaagataataatcttggctcagtttgtataaactgtcaaattttcaaataataggtagggggctttcactaggaaaatcatgtgctcagaagaggaaatgactcgtagtcaggttcaggagttagtggagtatttggactttggtactgctgtcttccaaggtagctctaagttttgatgtgtgggcttctgagtttatattctgaaaggaaatacacttcttttgaacatccccactaggttcttttccattgtcaataaggagcatcagccagtgaatctgtttcaggtttccattctgcagaactcctccaaagcatgtgctagtggcaagacagtggttcttatgatgttttcccttaacttttccttgtatgttcttgggtggttcctaagggaaagggaagcacatgatcatgggaatgatagcccagaacaaaaagaaatcttgtcttaccacagtgttttataggagagattgggagaaatcatcctgttttctctgtgacctgatttcagaagagactgatccaaaaattataacggcagggaacctagtgcatttggcactgagatttaaatgcaaccagaattgtcctcaaggcccagccataaaagcattgtctctctcgaccttctggtatcttgttagagagcttttcactgtgaggaagtgtggaaaaatagctctgtgtgtgtgtgtgtgtgtgtgtgtgtgtgtgtgtgtaatctgttaggttggggataggttttctgctagccaatattaaaagagacctgcaataaaaaaattaccctgatctgatagaaagcaagtgtttttgtatgtgtgggtgaatgtgtgttcatgcccgtatatgtctacacacagatgacaaattatatttgaaatcgttggaaaataaattcagatcaaaatgcctttcaggcccattacctagaaatctatcttaaaacctgggtatgttcctaaggtcatttctttgcttatgctaaattaattacaattatgaatggaggatattctactgtacttttttaaaaagaaactatttttgtgtttgaaagtgaaaccaacatccagatctatagcagagtccttattcttctcataaatctttttactttggctacaaatagatgatggtatgattctattatatattttatataaaatccatccaaattaagttttgggtaagtgtgttgtttaatctgaactatagtaacttaatactctaaacaatagttcactccatttggtcctttctccacagatgtaattatgttttcaactcaggaactatggcaaggaactttccccagatcaaattctattaacgctgagatacaagtcatccatgcacagccactatcataccctttattctcactgaaaggcagaactcagaacctgttattttatgtctgtaatcatgtactttggcatcttttggaggaaaggggcaggataactcactggaatgtacagtattttgctagtgcatttcaaggaatggaatcttctccagtatgaaattaccagatataaaataatgtaatgatgctgaggatataagcttttagaaggtaatttgatggtatttctttctcgaatgaaaagctgctggtttaccctcaaccctattcattagcattaccatgagtgaatttatatctaattatttccacttgccctgttctcttcacaccaaggaagctccagatccagtatcttgtttggcctcaaaacagaagcagcttcttttgtctcccagcagtagtgagccactcagtctcttccacaggaagtttggagcctacattccttgagtcaggagcttattacagaaaaaccccgtttccctgaacttttggctaacagaaattaatttaactgacatgcatattgattctgaaatttttttcctaagtttttttcatttttttgaatgagttttttaaattttttagatgaccaaaacttgcagggcaggggatgcccagaagagtggtgagatagtaaaacacttattccctcatcctttcaggttttcaggttgcccatttatattcatttacatgtcatttgactgtctcactttttacccagaacagtaacaacccacaccgtcttccttcagggatttccaactggcactctgtgggtgctacacagaatgcaatttaatggatatttctcagcctggttcagaataaattgatcctttgatcccagaaagtatatactgaagtgtgggataaagattatgattaggggagggttggagacaaaagctgtaaattactatggctgatttatttctactatatacatatatattttttgcttttgtatatcctatataggaaactaagcattgtattttttttaacaaatctaaaaaagcactatgaactacaggtgtttgactttcaaaatatattttgtattgttaatatcttcacattgtgtgaatactggaagctgcagatctttgctaggacgcaataaatttatatactttttgaggggttcttctggggtgctaatcaggcccctgttatgcttagggggagccctggtgctacttgcttgaagttttcagtgtaagtaccctgatgccttttggaccttgggatcagatcaagagttttggagatcaggtaccaaggaaataaggacagtctagctgcctcaagtgaggggccctttgcatagctctccttccccctcactgaagctgggtagcctattggggttgagagggaaaatgtgaaatctcagaatttatctcccttagaagagagccagtaacttatgtacaaggatgaaagaaaggtcgcagcagtagctttggggaaagggaggaagatatggcacttctccaaccccggaaaacattgcttttgaaaactgctgataaaatatgagccggttattacttctgtttgggagactgtgctctctgtggtgcctctcttggctctactccacagataccagacctcttctaagaggatgagcagaccagctttgaggttgacctgtttctctttgtctgccttcccaaaacaccagcccccaggaagacattaagcagccttaagcttaaattcctactccctcttccaaatttggctcacttgccttagatccaaggcagggaaaggaaaagaaggggggtctctggctttattactcccctaagtctttactctgacttccccaaacccagaaagattttctccacagtgttcatttgaaagaggagtattttgtcccattttccccttcctcattatcaaacagccccagtcttccttgtctctgctaagaaagtagaggcatgatgatctgcctctcaactgccctaagtcctagctaagtatcaggggaaaaaaaaaaaaaaaaagcctaacaaatgggattagactagggctgcaagtagtgaggattttgttgatacctctgctgggatgtgtgctttcccatatcttgccttcaggaattacactgtgccttttccccagggatatgggctctgtctacccagtgctccagtttcccggtaactgctcttgaacattgtggacaagggcaggtcttcatatttttgatcatccctttctcccagtgaaatcccatagcccttacctagagtctagggcacaaagacttcggggaagatacactgagattgacctgaggagacatctacacacaccagtggcagctgccccagggcctgcttccccttcctaagtctgtcatcctctggaagggatgggtggtgctccaatctctggtgcctaaaaacccaagtttatttctctcttaacactggcaataaccagtccacaccactgttgccttttaaaacctcttaataatctcatgctgtgtttgttttgattccaatccaattatcaccagggctgtgtgggtaaatgcttttaaatgctctctcatcttgttcttccccctcaccccccactcttaggtatgtatgatgctaatcttgtccctaagtaagtttcttcctgctccttttgtatcttcctttcttgtctttcctcctaccttttgtctcttggtgttttgggacttttttttttttttttttggccttttgtacaaagattagtttcaatgtagtctgtagcctcctttgtaaaccaattaaaaagttttttaataaaaaaaaaaaaaaaaaaaaaa

SEQ ID NO: 210 - DNA, 6359 bp, Homo sapiens
  source 1..6359: mol_type = genomic DNA
gggacgaatttcctccccagctcagctcccctacagcttggctaggcctgctccgagcgcctgcaaggtggaggaggcctgcgcctcgggcctggcagcggcagccggcgagggaggcgggcacagcggggtaaccggcgagccgtagccgctctcgaaaacctacgctgccacggccgctcattgtctctccccttccacccgggggcaaacaggaagcgcgccgcctggcagaccgacggacaggcgcctggaccaatgagcacagccgacaaagagcacggcggcgaatgagagccaagaagaggggcgggagttccgggcgggctgtcaccctcttccccccttttgggctggaggctccaccttttgtgtttcccgcacagtcaatcaaaataggaaaaaaaaatccccggaccgctccggccgtgtccgccgccgcttcccgcatcctctcccgccgccgccgccttcgctcctcaccatgtgtaaggcggcggggagccccgcctgaggtgccctaaacacactatgaccgctcccgaaaagcccgtgaaacaagaggaaatggctgccttggacgtggatagcggcggcggcggtggcggcggcggcggccacggcgagtatctgcagcagcagcaacagcacggaaacggtgcggtggcggcggcagcggcggcccaggacactcagccgtcaccgctcgctctgctggccgctacctgcagcaagatagggccgccatcgccgggcgacgacgaggaggaggcggccgccgcagccggggcccccgccgccgccggagcgacaggtgatttggcttctgcacagttaggaggagcaccaaaccgatgggaggttttgtcagccacacctacaactataaaagatgaagctggtaatctagtccagattccaagtgctgctacttcaagtgggcagtatgttcttccccttcagaatttgcagaatcaacaaatattttccgttgcaccaggatcagattcatcaaatggtacagtgtccagtgttcaatatcaagtgataccacagatccagtcagcagatggtcagcaggttcaaattggtttcacaggctcttcagataatgggggtataaatcaagaaagcagtcaaattcagatcattcctggctctaatcaaaccttacttgcctctggaacaccttctgctaacatccagaatctcataccacagactggtcaagtccaggttcagggagttgcaattggtggttcatcttttcctggtcaaacccaagtagttgctaatgtgcctcttggtctgccaggaaatattacgtttgtaccaatcaatagtgtcgatctagattctttgggactctcgggcagttctcagacaatgactgcaggcattaatgccgacggacatttgataaacacaggacaagctatggatagttcagacaattcagaaaggactggtgagcgggtttctcctgatattaatgaaactaatactgatacagatttatttgtgccaacatcctcttcatcacagttgcctgttacgatagatagtacaggtatattacaacaaaacacaaatagcttgactacatctagtgggcaggttcattcttcagatcttcagggaaattatatccagtcgcctgtttctgaagagacacaggcacagaatattcaggtttctacagcacagcctgttgtacagcatctacaacttcaagagtctcagcagccaaccagtcaagcccaaattgtgcaaggtattacaccacagacaatccatggtgtgcaagccagtggtcaaaatatatcacaacaggctttgcaaaatcttcagttgcagctgaatcctggaacctttttaattcaggcacagacagtgaccccttctggacaggtaacttggcaaacgtttcaagtacaaggggtccagaacttgcagaatttgcaaatacagaatactgctgcccaacaaataactttgacgcctgttcaaaccctcacacttggtcaagttgcggcaggtggagccttcacttcaactccagttagtctaagcactggtcagttgccaaatctacaaacagttacagtgaactctatagattctgctggtatacagctacatccaggagagaatgctgacagtcctgcagatattaggatcaaggaagaagaacctgatcctgaagagtggcagctcagtggtgattctaccttgaataccaatgacctaacacacttaagagtacaggtggtagatgaagaaggggaccaacaacatcaagaaggaaaaagacttcggagggtagcttgcacctgtcccaactgtaaagaaggtggtggaagaggtaccaatcttgggaaaaagaagcaacacatttgtcatataccaggatgtggtaaagtctatgggaagacctcacatctgagagctcatctgcgttggcattctggagaacgcccttttgtttgtaactggatgtactgtggtaaaagatttactcgaagtgatgaattacagaggcacagaagaacacatacaggtgagaagaaatttgtttgtccagaatgttcaaaacgctttatgagaagtgaccaccttgccaaacatattaaaacacaccagaataaaaaaggtattcactctagcagtacagtgctggcatctgtggaagctgcgcgagatgatactttgattactgcaggaggaacaacgcttatccttgcaaatattcaacaaggttctgtttcagggataggaactgttaatacttccgccaccagcaatcaagatatccttaccaacactgaaatacctttacagcttgtcacagtttctggaaatgagacaatggagtaaatattacacaaatacttattcattgtggttatttttatacagtagtgagaagaatattgttcctaagttcttagatatctttttattgatgtgcaaaaatttttggattgacagtaacttggttatacatgacactgaaatgccttactttgtatgatattccatagtatattaaaaatggtaaaattgcatgggttttgtaggtacttttggaatctagaagaaatgaaattttaccaagttatataaagagaaaattgaatttaacaatgcgaatggtagtctaaccaaatgcatcaatcctgtgtggtttagtgtaaaaatgagaacatgttggtatttatctattgtaagataaaaaagctggtgggtgaaagaaatcatgttatgataaaaaattttgtaattttcttgatgactggaatttttattatgcataactgacaaatcaagtttccaagcaaatgttacatagtgtaggctttacttagcttatcaatttgtcattttgaagctaattattttaattaggttaactatgtacaatattttaagcattactcttgtaagattttgaaaactacattttaacatggaactctagggatagtcaccttttaaatcctgttgaaaagccatgtttaagatttaatttgccaaaataatgtcttgttaatattctttcaataacgaagttgggcaatataaccaatgtttaaaaaagtttaaaatgtataagttgaggcatttgggtggtaagagaatgttatagtgaattatcccttttcttgactattggaggaccaaaaaaataaggtgtattgcgtcttagcagtgatttttatccaatcttgtttccaaaaaccatgtctcccagggccttaaaagccatcatgtaaattaccagtaaagtgtaacatatgcaaacataacaaaatcacttccatagtgacgatactccaaccatatggatattagtcatagaagaactagaggttttatgatatttttttaagtcttttttttttttgtctaggtagtcagtctgcacttaaatatcaatcattttccttttttgcttcttcccttaaaatttatatgtatccagtacatttaattgagaagcgtatgttttttattatgctgtattttctttttattttttaattattgtttatattttcaattcaaaaatgtacaaaataaagttacattgctggtcttgtaagagctatacagttttcctaaatgtatacctgtaactgcagcagttcacctatttcaaaaatttggaattctgttcatttgttattcttaagaccacctcaaatttaaaggctaccttattgtacgtttaaagtgtattataacagtgtggtagttaataaaacactatttttttttcttttgagtttgttgtattcctatgcataaaaaatattgcagtggtatggggtaagaattggtggtttatttttcttcaacttggctttttatttttagattcttgattttagacactgaattgtaaacaggcatttatttgaagaagagatatatagagacactggtcatttactaattttttacctagagtaaataagaatgagcttattaaataaaatttttgaaaaaaagtcttagcccttagcccacattgattcatatcagttttatcagtaccattttgcaatttttttgttttccgttttaaagcaatgcagaatattttgatttatcgaaaacctgaatttacattaagactcctgaaaatgataagacaagcgttggtaaccatggcaggagttacttgaaaaagttgcctttgaatttgcatgtgtttcatcattataaaggcagagtaggaggaaagagtattaatgtgattgtgtattgtagatgttttaaagtaaaaatcaagtttcttaacacatgtatacagtgggggtaaagatgtccattttctgttttccaggcccagtctgactctgtctgtaatacctgattgcattggagaactctagacacgcataaacatggacagtttttctaaatgtgagacttaagcctgtgatgtaaaataggaagttctacttggaataatataaaggaaccactagaatttacaattattttgaagttacagggattagattttgaatcttaaaatcctttaggtaatttttagaatttttaaattaagattaatgtgaagagaattaagtgagcagcaggtggttcacttgagcaaactgcccattaagtcagattaaaccatttgaatgatagtagagatgttttaagtaatactggatttttacagtaagtttatggtgtactttgaatcgataggtgtccatgcatattttatgaattcgtggagaatgaatgcaatgaagaaagtaagtagtcttgaaaattatttaaataaagttgtagatttttttagtgccccctaggaatatattagtgaactttggaacttttaccaaagttatgtaacctcagtgtagataattttaaatatttctatttttatattttaaaatgttgaatatactctggaaacaacatttgaagatttgctctgatgtcaactttttctggttataaaacctattagtattgtgtataattctcagggtaggtatactctaataggtgttttgtcaattgctttatttttgtaaaggctagagttagtgcatattgaatatatttatgtacaaataattcctgttgtaacatttagtggacgcgattatctgtatacctcaaattttaatttaagaaagtatcacttaaagagcatctcattttctatagattgaggcttaattactgaaaagtgactcaaccaaaaagcacataaccttttaaaggagctacacctaccgcagaaagtcagatgccctgtaaataactttggtctttcaaaatagtggcaatgcttaagatacttaaaaatacacatacatataagctgaaagcatgtcaagcctatttcatagaaaatagttcttaaacagtattgttcattagaaattgctggggagcattttagagattccataggcctggtagccacctcagcttactaaatcaacatctctggagatggagtgtatatgtgttttgaaacagctgctcaagtggttctgttaaacactcctgcgttacaatcacttaaaatagagcaagcatccccttaggctcttaattgtagtttaaattccagtactgcctactcagacccaaaagttttgttttatgaaaaatttgtattgtgttcaatattgtttgaaatttggggttgttgcataaatgattatggaataacatttggttttaaaataatataaactgacatgttatgctacctgttacacaatttggttttcagttttaattatatgaagctggtaacaatcgtttttgttgtaaaagaattatttttcactaaacagtatgtttaaaactga

SEQ ID NO: 211 - DNA, 6008 bp, Homo sapiens
  source 1..6008: mol_type = genomic DNA
cctcgcccgcctgccgcctttttgtgcgcgtgtgagtgtgggccccagcgtgccctcccgggggtgggttccgggcggaaggcggaggcccggcgcgcagcccgccgcccgcctgcccgcggaccggggagccggggtgcttggagcgggggacgccaggcgtgggctggcggcgggaccaggaggaggaggaggaggaggaggagagcgcgggctggcgcttgcccgggcgcagtcggcggggaccgagtcgtacttcctgtgcgaaaggcggcccgaccctaaccgccaccccctccccctgtctccctctctgaacccgcccattgggggtaggacactcagccgtcaccgctcgctctgctggccgctacctgcagcaagatagggccgccatcgccgggcgacgacgaggaggaggcggccgccgcagccggggcccccgccgccgccggagcgacaggtgatttggcttctgcacagttaggaggagcaccaaaccgatgggaggttttgtcagccacacctacaactataaaagatgaagctggtaatctagtccagattccaagtgctgctacttcaagtgggcagtatgttcttccccttcagaatttgcagaatcaacaaatattttccgttgcaccaggatcagattcatcaaatggtacagtgtccagtgttcaatatcaagtgataccacagatccagtcagcagatggtcagcaggttcaaattggtttcacaggctcttcagataatgggggtataaatcaagaaagcagtcaaattcagatcattcctggctctaatcaaaccttacttgcctctggaacaccttctgctaacatccagaatctcataccacagactggtcaagtccaggttcagggagttgcaattggtggttcatcttttcctggtcaaacccaagtagttgctaatgtgcctcttggtctgccaggaaatattacgtttgtaccaatcaatagtgtcgatctagattctttgggactctcgggcagttctcagacaatgactgcaggcattaatgccgacggacatttgataaacacaggacaagctatggatagttcagacaattcagaaaggactggtgagcgggtttctcctgatattaatgaaactaatactgatacagatttatttgtgccaacatcctcttcatcacagttgcctgttacgatagatagtacaggtatattacaacaaaacacaaatagcttgactacatctagtgggcaggttcattcttcagatcttcagggaaattatatccagtcgcctgtttctgaagagacacaggcacagaatattcaggtttctacagcacagcctgttgtacagcatctacaacttcaagagtctcagcagccaaccagtcaagcccaaattgtgcaaggtattacaccacagacaatccatggtgtgcaagccagtggtcaaaatatatcacaacaggctttgcaaaatcttcagttgcagctgaatcctggaacctttttaattcaggcacagacagtgaccccttctggacaggtaacttggcaaacgtttcaagtacaaggggtccagaacttgcagaatttgcaaatacagaatactgctgcccaacaaataactttgacgcctgttcaaaccctcacacttggtcaagttgcggcaggtggagccttcacttcaactccagttagtctaagcactggtcagttgccaaatctacaaacagttacagtgaactctatagattctgctggtatacagctacatccaggagagaatgctgacagtcctgcagatattaggatcaaggaagaagaacctgatcctgaagagtggcagctcagtggtgattctaccttgaataccaatgacctaacacacttaagagtacaggtggtagatgaagaaggggaccaacaacatcaagaaggaaaaagacttcggagggtagcttgcacctgtcccaactgtaaagaaggtggtggaagaggtaccaatcttgggaaaaagaagcaacacatttgtcatataccaggatgtggtaaagtctatgggaagacctcacatctgagagctcatctgcgttggcattctggagaacgcccttttgtttgtaactggatgtactgtggtaaaagatttactcgaagtgatgaattacagaggcacagaagaacacatacaggtgagaagaaatttgtttgtccagaatgttcaaaacgctttatgagaagtgaccaccttgccaaacatattaaaacacaccagaataaaaaaggtattcactctagcagtacagtgctggcatctgtggaagctgcgcgagatgatactttgattactgcaggaggaacaacgcttatccttgcaaatattcaacaaggttctgtttcagggataggaactgttaatacttccgccaccagcaatcaagatatccttaccaacactgaaatacctttacagcttgtcacagtttctggaaatgagacaatggagtaaatattacacaaatacttattcattgtggttatttttatacagtagtgagaagaatattgttcctaagttcttagatatctttttattgatgtgcaaaaatttttggattgacagtaacttggttatacatgacactgaaatgccttactttgtatgatattccatagtatattaaaaatggtaaaattgcatgggttttgtaggtacttttggaatctagaagaaatgaaattttaccaagttatataaagagaaaattgaatttaacaatgcgaatggtagtctaaccaaatgcatcaatcctgtgtggtttagtgtaaaaatgagaacatgttggtatttatctattgtaagataaaaaagctggtgggtgaaagaaatcatgttatgataaaaaattttgtaattttcttgatgactggaatttttattatgcataactgacaaatcaagtttccaagcaaatgttacatagtgtaggctttacttagcttatcaatttgtcattttgaagctaattattttaattaggttaactatgtacaatattttaagcattactcttgtaagattttgaaaactacattttaacatggaactctagggatagtcaccttttaaatcctgttgaaaagccatgtttaagatttaatttgccaaaataatgtcttgttaatattctttcaataacgaagttgggcaatataaccaatgtttaaaaaagtttaaaatgtataagttgaggcatttgggtggtaagagaatgttatagtgaattatcccttttcttgactattggaggaccaaaaaaataaggtgtattgcgtcttagcagtgatttttatccaatcttgtttccaaaaaccatgtctcccagggccttaaaagccatcatgtaaattaccagtaaagtgtaacatatgcaaacataacaaaatcacttccatagtgacgatactccaaccatatggatattagtcatagaagaactagaggttttatgatatttttttaagtcttttttttttttgtctaggtagtcagtctgcacttaaatatcaatcattttccttttttgcttcttcccttaaaatttatatgtatccagtacatttaattgagaagcgtatgttttttattatgctgtattttctttttattttttaattattgtttatattttcaattcaaaaatgtacaaaataaagttacattgctggtcttgtaagagctatacagttttcctaaatgtatacctgtaactgcagcagttcacctatttcaaaaatttggaattctgttcatttgttattcttaagaccacctcaaatttaaaggctaccttattgtacgtttaaagtgtattataacagtgtggtagttaataaaacactatttttttttcttttgagtttgttgtattcctatgcataaaaaatattgcagtggtatggggtaagaattggtggtttatttttcttcaacttggctttttatttttagattcttgattttagacactgaattgtaaacaggcatttatttgaagaagagatatatagagacactggtcatttactaattttttacctagagtaaataagaatgagcttattaaataaaatttttgaaaaaaagtcttagcccttagcccacattgattcatatcagttttatcagtaccattttgcaatttttttgttttccgttttaaagcaatgcagaatattttgatttatcgaaaacctgaatttacattaagactcctgaaaatgataagacaagcgttggtaaccatggcaggagttacttgaaaaagttgcctttgaatttgcatgtgtttcatcattataaaggcagagtaggaggaaagagtattaatgtgattgtgtattgtagatgttttaaagtaaaaatcaagtttcttaacacatgtatacagtgggggtaaagatgtccattttctgttttccaggcccagtctgactctgtctgtaatacctgattgcattggagaactctagacacgcataaacatggacagtttttctaaatgtgagacttaagcctgtgatgtaaaataggaagttctacttggaataatataaaggaaccactagaatttacaattattttgaagttacagggattagattttgaatcttaaaatcctttaggtaatttttagaatttttaaattaagattaatgtgaagagaattaagtgagcagcaggtggttcacttgagcaaactgcccattaagtcagattaaaccatttgaatgatagtagagatgttttaagtaatactggatttttacagtaagtttatggtgtactttgaatcgataggtgtccatgcatattttatgaattcgtggagaatgaatgcaatgaagaaagtaagtagtcttgaaaattatttaaataaagttgtagatttttttagtgccccctaggaatatattagtgaactttggaacttttaccaaagttatgtaacctcagtgtagataattttaaatatttctatttttatattttaaaatgttgaatatactctggaaacaacatttgaagatttgctctgatgtcaactttttctggttataaaacctattagtattgtgtataattctcagggtaggtatactctaataggtgttttgtcaattgctttatttttgtaaaggctagagttagtgcatattgaatatatttatgtacaaataattcctgttgtaacatttagtggacgcgattatctgtatacctcaaattttaatttaagaaagtatcacttaaagagcatctcattttctatagattgaggcttaattactgaaaagtgactcaaccaaaaagcacataaccttttaaaggagctacacctaccgcagaaagtcagatgccctgtaaataactttggtctttcaaaatagtggcaatgcttaagatacttaaaaatacacatacatataagctgaaagcatgtcaagcctatttcatagaaaatagttcttaaacagtattgttcattagaaattgctggggagcattttagagattccataggcctggtagccacctcagcttactaaatcaacatctctggagatggagtgtatatgtgttttgaaacagctgctcaagtggttctgttaaacactcctgcgttacaatcacttaaaatagagcaagcatccccttaggctcttaattgtagtttaaattccagtactgcctactcagacccaaaagttttgttttatgaaaaatttgtattgtgttcaatattgtttgaaatttggggttgttgcataaatgattatggaataacatttggttttaaaataatataaactgacatgttatgctacctgttacacaatttggttttcagttttaattatatgaagctggtaacaatcgtttttgttgtaaaagaattatttttcactaaacagtatgtttaaaactga

SEQ ID NO: 212 - DNA, 4394 bp, Homo sapiens
  source 1..4394: mol_type = genomic DNA
agcccacgtgagagggcaggacgcctgagagcttgaggccacacgaggctgtggagcggcgtgactcaaacgtggcgcgcatcagctcgcacacttccaaacctcgcgatagctactggccctgggcgagccgttgggattgcgcttgcgcacagcgtgtcttgtacgttcccgcgcttttctggaatctttcgcccccggaagggcagcggcgggcgcctgtgtggaaggtggggtggccagagacacccgagggacctgagctggatcgccatacctaccctgtggtcctcatcttcctggcctcatagctcctcctctccaagcatgtcttccccgttgcaaagagctgtgggagataccaagagggccttgtctgcatcttctagttcctctgccagtctaccctttgatgacagggactcaaaccatacctcagaggggaatggcgactctttgttagctgatgaagacactgactttgaagacagcttgaatcgcaatgtgaagaagagagcagcaaaacgaccaccgaaaacaacaccggtggcaaaacatccaaagaaagggtcccgagtggtacatcgtcatagccggaaacagtcagagccaccagccaatgatcttttcaatgctgtgaaagccgccaaaagtgacatgcagtctttggtagatgagtggctggatagctacaagcaagaccaggatgcaggatttctggagcttgttaactttttcatccaatcttgcggatgtaaaggcattgtgacccctgagatgttcaagaagatgtccaactcagagatcatccagcacctaacagagcagtttaatgaggactcgggggactaccctctcatagctccaggtccatcctggaagaagttccagggcagcttctgtgaatttgtgaggacattggtctgtcagtgccagtacagcctcctctatgatggcttccctatggacgacctcatctccctgctcactggcctctcagactcacaagtccgcgccttccgtcacactagcaccctggctgctatgaaactgatgacctccctggtaaaagttgccctccaactgagtgtgcaccaagataacaatcagcgtcagtatgaggctgaaagaaacaaggggccagggcagagggcacctgagcggctggagagcctgttggagaaacgcaaagagctccaagagcatcaagaggagattgaggggatgatgaatgccctcttcaggggtgtctttgttcatcggtacagggatgtccttcctgagatccgtgctatctgcattgaggaaattgggtgttggatgcaaagctacagcacgtctttcctcaccgacagctatttaaaatatattggttggactctgcatgataagcaccgagaagtccgcctgaagtgtgtgaaggccctgaaagggctgtacggtaaccgggacctgaccacacgcctggagctcttcaccagccgcttcaaggaccggatggtttccatggtcatggacagagagtatgatgtggcagtggaggctgtcagattactgatacttatccttaagaacatggaaggggtgctgacggacgcggattgtgagagcgtctacccagttgtgtatgcctctcatcgaggcctggcctctgccgcaggcgaatttctgtactggaaactcttctaccctgagtgcgagataagaatgatgggtggaagagagcaacgccagagcccaggcgcccagaggactttcttccagcttctgctgtccttctttgtggagagcgagctccatgaccacgctgcttacttagtagacagtctgtgggactgtgcaggggctcggctgaaggactgggagggtctgacaagcctgctgctggagaaggaccagaacctgggtgatgtgcaggagagcacactgatagaaatccttgtgtccagtgcccggcaagcttcagaggggcacccgcctgtgggccgggtcactgggaggaagggcttaacctctaaggagcgcaagacccaagccgatgacagggtgaagttgactgagcacctcatccccctgctgccccagctcctggccaagttctcagctgatgcagagaaggtcactcccctgctccagcttctcagctgctttgacctccacatctactgcactgggcgcttggagaagcacctggagctgttcctgcagcaactccaggaggtggtggtgaagcatgcagagccagcggtgcttgaggctggggcgcatgccctctacctgctctgtaatcccgaattcactttcttcagccgggcggactttgcccgcagccagctagtagatttgctgactgaccgcttccagcaggagcttgaagagctgttacagtcgtccttcctagatgaggatgaggtatataatctggcagccactctgaaacgcctctctgccttctacaacactcatgacctgactcgctgggagctctatgagccatgttgccaactcctgcagaaggctgtggacacaggagaggttcctcaccaggttatcctgccagccttgactcttgtctatttttccattctctggacactaacccacatttctaaatcagatgcttcccagaagcagctgtcgagtttgagggacagaatggtggccttctgtgaactctgccagagttgcctctcagatgtggatactgagatccaggagcaggcttttgtcttattaagtgatctacttctcatctttagccctcagatgattgttgggggccgtgatttccttaggccacttgtcttttttcctgaagctactctccagtctgagctagccagcttcctcatggaccacgtcttcatccagccgggagacctgggcagtggtgattcccaggaggatcatttacagatagagcggctacaccagcggcgccgcctcctagccgggttctgcaagctgttgctttatggggtgctggagatggatgcagcctcagatgttttcaaacactacaacaagttctacaatgactatggtgacattatcaaggaaacattaactagagcaaggcagattgaccgaagtcattgttcccgaatcctgctgctgagcctcaagcagctgtacacagaactgctgcaggagcatgggccccagggcctgaatgagcttcctgccttcatcgagatgagggacctggcccggaggtttgccttgagttttggaccccagcagctgcagaaccgtgacctcgtggtcatgctacacaaggaaggcatccagttctccttgtctgagcttcctccagctggctcctccaatcagcctccaaatctggcattcctggagctcctttcagagttttccccccgactcttccatcaggacaagcagcttttactgtcctatctagaaaagtgcctgcagcatgtctcccaggcacctggccatccctggggcccagtcaccacctactgccactccctcagccctgtggagaacacagcagagaccagccctcaggtcctccccagctccaagaggaggcgcgttgaagggcctgccaagcctaacagagaggacgtctcctcgtcccaggaagaaagtctgcagctgaacagcatcccgcccacgcccaccctcacctccacagctgtgaagagcaggcagcccctgtgggggttgaaagagatggaggaagaagatggctcagagttggattttgcccagggtcagcccgtcgcaggcaccgagaggtcaaggttcttgggtccacaatatttccagactccacacaacccttcaggtcctggcctgggcaaccagctgatgcgactcagccttatggaagaggacgaggaagaagagttagaaatccaggatgagtcaaatgaagaacggcaggatacagacatgcaagcaagtagctactcttccaccagtgagcgcgggctggacctcttagattctacagagctggatattgaggatttctgacaggactctgggcccctccccagctccactccctacctcaagaatgtgaccatttggaaaaggcaaagagaaaaggagcaaaatgaagcattcccccaggcttcagccctgggctctgaggggaaagagttgggcattgtttttctaacctaacctttccctctggggtagagaagccgagagaccctgtcctccctaatgcactgtggcccagtccccttgcctttttcctgttctgtttggagtggagaagggcagcacctctgtgtttaatggaaatagcccatagtctcctggatttttggaacatctttctcagcctattttgtgtcctaatgattcgctcaataaacatgtttgaatccacacgttaaaaaaaaaaaaaaaaa

SEQ ID NO: 213 - DNA, 4313 bp, Homo sapiens
  source 1..4313: mol_type = genomic DNA
cgggccgcccgcgtgcccaagcccacgtgagagggcaggacgcctgagagcttgaggccacacgaggctgtggagcggcgtgactcaaacgtggcgcgcatcagctcgcacacttccaaacctcgcgatagctactggccctgggcgagccgttgggattgcgcttgcgcacagcgtgtcttctggatcgccatacctaccctgtggtcctcatcttcctggcctcatagctcctcctctccaagcatgtcttccccgttgcaaagagctgtgggagataccaagagggccttgtctgcatcttctagttcctctgccagtctaccctttgatgacagggactcaaaccatacctcagaggggaatggcgactctttgttagctgatgaagacactgactttgaagacagcttgaatcgcaatgtgaagaagagagcagcaaaacgaccaccgaaaacaacaccggtggcaaaacatccaaagaaagggtcccgagtggtacatcgtcatagccggaaacagtcagagccaccagccaatgatcttttcaatgctgtgaaagccgccaaaagtgacatgcagtctttggtagatgagtggctggatagctacaagcaagaccaggatgcaggatttctggagcttgttaactttttcatccaatcttgcggatgtaaaggcattgtgacccctgagatgttcaagaagatgtccaactcagagatcatccagcacctaacagagcagtttaatgaggactcgggggactaccctctcatagctccaggtccatcctggaagaagttccagggcagcttctgtgaatttgtgaggacattggtctgtcagtgccagtacagcctcctctatgatggcttccctatggacgacctcatctccctgctcactggcctctcagactcacaagtccgcgccttccgtcacactagcaccctggctgctatgaaactgatgacctccctggtaaaagttgccctccaactgagtgtgcaccaagataacaatcagcgtcagtatgaggctgaaagaaacaaggggccagggcagagggcacctgagcggctggagagcctgttggagaaacgcaaagagctccaagagcatcaagaggagattgaggggatgatgaatgccctcttcaggggtgtctttgttcatcggtacagggatgtccttcctgagatccgtgctatctgcattgaggaaattgggtgttggatgcaaagctacagcacgtctttcctcaccgacagctatttaaaatatattggttggactctgcatgataagcaccgagaagtccgcctgaagtgtgtgaaggccctgaaagggctgtacggtaaccgggacctgaccacacgcctggagctcttcaccagccgcttcaaggaccggatggtttccatggtcatggacagagagtatgatgtggcagtggaggctgtcagattactgatacttatccttaagaacatggaaggggtgctgacggacgcggattgtgagagcgtctacccagttgtgtatgcctctcatcgaggcctggcctctgccgcaggcgaatttctgtactggaaactcttctaccctgagtgcgagataagaatgatgggtggaagagagcaacgccagagcccaggcgcccagaggactttcttccagcttctgctgtccttctttgtggagagcgagctccatgaccacgctgcttacttagtagacagtctgtgggactgtgcaggggctcggctgaaggactgggagggtctgacaagcctgctgctggagaaggaccagaacctgggtgatgtgcaggagagcacactgatagaaatccttgtgtccagtgcccggcaagcttcagaggggcacccgcctgtgggccgggtcactgggaggaagggcttaacctctaaggagcgcaagacccaagccgatgacagggtgaagttgactgagcacctcatccccctgctgccccagctcctggccaagttctcagctgatgcagagaaggtcactcccctgctccagcttctcagctgctttgacctccacatctactgcactgggcgcttggagaagcacctggagctgttcctgcagcaactccaggaggtggtggtgaagcatgcagagccagcggtgcttgaggctggggcgcatgccctctacctgctctgtaatcccgaattcactttcttcagccgggcggactttgcccgcagccagctagtagatttgctgactgaccgcttccagcaggagcttgaagagctgttacagtcgtccttcctagatgaggatgaggtatataatctggcagccactctgaaacgcctctctgccttctacaacactcatgacctgactcgctgggagctctatgagccatgttgccaactcctgcagaaggctgtggacacaggagaggttcctcaccaggttatcctgccagccttgactcttgtctatttttccattctctggacactaacccacatttctaaatcagatgcttcccagaagcagctgtcgagtttgagggacagaatggtggccttctgtgaactctgccagagttgcctctcagatgtggatactgagatccaggagcaggcttttgtcttattaagtgatctacttctcatctttagccctcagatgattgttgggggccgtgatttccttaggccacttgtcttttttcctgaagctactctccagtctgagctagccagcttcctcatggaccacgtcttcatccagccgggagacctgggcagtggtgattcccaggaggatcatttacagatagagcggctacaccagcggcgccgcctcctagccgggttctgcaagctgttgctttatggggtgctggagatggatgcagcctcagatgttttcaaacactacaacaagttctacaatgactatggtgacattatcaaggaaacattaactagagcaaggcagattgaccgaagtcattgttcccgaatcctgctgctgagcctcaagcagctgtacacagaactgctgcaggagcatgggccccagggcctgaatgagcttcctgccttcatcgagatgagggacctggcccggaggtttgccttgagttttggaccccagcagctgcagaaccgtgacctcgtggtcatgctacacaaggaaggcatccagttctccttgtctgagcttcctccagctggctcctccaatcagcctccaaatctggcattcctggagctcctttcagagttttccccccgactcttccatcaggacaagcagcttttactgtcctatctagaaaagtgcctgcagcatgtctcccaggcacctggccatccctggggcccagtcaccacctactgccactccctcagccctgtggagaacacagcagagaccagccctcaggtcctccccagctccaagaggaggcgcgttgaagggcctgccaagcctaacagagaggacgtctcctcgtcccaggaagaaagtctgcagctgaacagcatcccgcccacgcccaccctcacctccacagctgtgaagagcaggcagcccctgtgggggttgaaagagatggaggaagaagatggctcagagttggattttgcccagggtcagcccgtcgcaggcaccgagaggtcaaggttcttgggtccacaatatttccagactccacacaacccttcaggtcctggcctgggcaaccagctgatgcgactcagccttatggaagaggacgaggaagaagagttagaaatccaggatgagtcaaatgaagaacggcaggatacagacatgcaagcaagtagctactcttccaccagtgagcgcgggctggacctcttagattctacagagctggatattgaggatttctgacaggactctgggcccctccccagctccactccctacctcaagaatgtgaccatttggaaaaggcaaagagaaaaggagcaaaatgaagcattcccccaggcttcagccctgggctctgaggggaaagagttgggcattgtttttctaacctaacctttccctctggggtagagaagccgagagaccctgtcctccctaatgcactgtggcccagtccccttgcctttttcctgttctgtttggagtggagaagggcagcacctctgtgtttaatggaaatagcccatagtctcctggatttttggaacatctttctcagcctattttgtgtcctaatgattcgctcaataaacatgtttgaatccacacgttaaaaaaaaaaaaaaaaa

SEQ ID NO: 214 - DNA, 4397 bp, Homo sapiens
  source 1..4397: mol_type = genomic DNA
agcccacgtgagagggcaggacgcctgagagcttgaggccacacgaggctgtggagcggcgtgactcaaacgtggcgcgcatcagctcgcacacttccaaacctcgcgatagctactggccctgggcgagccgttgggattgcgcttgcgcacagcgtgtcttgtacgttcccgcgcttttctggaatctttcgcccccggaagggcagcggcgggcgcctgtgtggaaggtggggtggccagagacacccgagggacctgagctggatcgccatacctaccctgtggtcctcatcttcctggcctcatagctcctcctctccaagcatgtcttccccgttgcaaagagctgtgggagataccaagagggccttgtctgcatcttctagttcctctgccagtctaccctttgatgacagggactcaaaccatacctcagaggggaatggcgactctttgttagctgatgaagacactgactttgaagacagcttgaatcgcaatgtgaagaagagagcagcaaaacgaccaccgaaaacaacaccggtggcaaaacatccaaagaaagggtcccgagtggtacatcgtcatagccggaaacagtcagagccaccagccaatgatcttttcaatgctgtgaaagccgccaaaagtgacatgcagtctttggtagatgagtggctggatagctacaagcaagaccaggatgcaggatttctggagcttgttaactttttcatccaatcttgcggatgtaaaggcattgtgacccctgagatgttcaagaagatgtccaactcagagatcatccagcacctaacagagcagtttaatgaggactcgggggactaccctctcatagctccaggtccatcctggaagaagttccagggcagcttctgtgaatttgtgaggacattggtctgtcagtgccagtacagcctcctctatgatggcttccctatggacgacctcatctccctgctcactggcctctcagactcacaagtccgcgccttccgtcacactagcaccctggctgctatgaaactgatgacctccctggtaaaagttgccctccaactgagtgtgcaccaagataacaatcagcgtcagtatgaggctgaaagaaacaaggggccagggcagagggcacctgagcggctggagagcctgttggagaaacgcaaagagctccaagagcatcaagaggagattgaggggatgatgaatgccctcttcaggggtgtctttgttcatcggtacagggatgtccttcctgagatccgtgctatctgcattgaggaaattgggtgttggatgcaaagctacagcacgtctttcctcaccgacagctatttaaaatatattggttggactctgcatgataagcaccgagaagtccgcctgaagtgtgtgaaggccctgaaagggctgtacggtaaccgggacctgaccacacgcctggagctcttcaccagccgcttcaaggaccggatggtttccatggtcatggacagagagtatgatgtggcagtggaggctgtcagattactgatacttatccttaagaacatggaaggggtgctgacggacgcggattgtgagagcgtctacccagttgtgtatgcctctcatcgaggcctggcctctgccgcaggcgaatttctgtactggaaactcttctaccctgagtgcgagataagaatgatgggtggaagagagcaacgccagagcccaggcgcccagaggactttcttccagcttctgctgtccttctttgtggagagcgagctccatgaccacgctgcttacttagtagacagtctgtgggactgtgcaggggctcggctgaaggactgggagggtctgacaagcctgctgctggagaaggaccagaacctgggtgatgtgcaggagagcacactgatagaaatccttgtgtccagtgcccggcaagcttcagaggggcacccgcctgtgggccgggtcactgggaggaagggcttaacctctaaggagcgcaagacccaagccgatgacagggtgaagttgactgagcacctcatccccctgctgccccagctcctggccaagttctcagctgatgcagagaaggtcactcccctgctccagcttctcagctgctttgacctccacatctactgcactgggcgcttggagaagcacctggagctgttcctgcagcaactccaggaggtggtggtgaagcatgcagagccagcggtgcttgaggctggggcgcatgccctctacctgctctgtaatcccgaattcactttcttcagccgggcggactttgcccgcagccagctagtagatttgctgactgaccgcttccagcaggagcttgaagagctgttacagtcgtccttcctagatgaggatgaggtatataatctggcagccactctgaaacgcctctctgccttctacaacactcatgacctgactcgctgggagctctatgagccatgttgccaactcctgcagaaggctgtggacacaggagaggttcctcaccaggttatcctgccagccttgactcttgtctatttttccattctctggacactaacccacatttctaaatcagatgcttcccagaagcagctgtcgagtttgagggacagaatggtggccttctgtgaactctgccagagttgcctctcagatgtggatactgagatccaggagcaggcttttgtcttattaagtgatctacttctcatctttagccctcagatgattgttgggggccgtgatttccttaggccacttgtcttttttcctgaagctactctccagtctgagctagccagcttcctcatggaccacgtcttcatccagccgggagacctgggcagtggtgattcccaggaggatcatttacagatagagcggctacaccagcggcgccgcctcctagccgggttctgcaagctgttgctttatggggtgctggagatggatgcagcctcagatgttttcaaacactacaacaagttctacaatgactatggtgacattatcaaggaaacattaactagagcaaggcagattgaccgaagtcattgttcccgaatcctgctgctgagcctcaagcagctgtacacagaactgctgcaggagcatgggccccagggcctgaatgagcttcctgccttcatcgagatgagggacctggcccggaggtttgccttgagttttggaccccagcagctgcagaaccgtgacctcgtggtcatgctacacaaggaaggcatccagttctccttgtctgagcttcctccagctggctcctccaatcagcctccaaatctggcattcctggagctcctttcagagttttccccccgactcttccatcaggacaagcagcttttactgtcctatctagaaaagtgcctgcagcatgtctcccaggcacctggccatccctggggcccagtcaccacctactgccactccctcagccctgtggagaacacagcagagaccagccctcaggtcctccccagctccaagaggaggcgcgttgaagggcctgccaagcctaacagagaggacgtctcctcgtcccaggaagaaagtctgcagctgaacagcatcccgcccacgcccaccctcacctccacagctgtgaagagcaggcagcccctgtgggggttgaaagagatggaggaagaagatggctcagagttggattttgcccagggcagtcagcccgtcgcaggcaccgagaggtcaaggttcttgggtccacaatatttccagactccacacaacccttcaggtcctggcctgggcaaccagctgatgcgactcagccttatggaagaggacgaggaagaagagttagaaatccaggatgagtcaaatgaagaacggcaggatacagacatgcaagcaagtagctactcttccaccagtgagcgcgggctggacctcttagattctacagagctggatattgaggatttctgacaggactctgggcccctccccagctccactccctacctcaagaatgtgaccatttggaaaaggcaaagagaaaaggagcaaaatgaagcattcccccaggcttcagccctgggctctgaggggaaagagttgggcattgtttttctaacctaacctttccctctggggtagagaagccgagagaccctgtcctccctaatgcactgtggcccagtccccttgcctttttcctgttctgtttggagtggagaagggcagcacctctgtgtttaatggaaatagcccatagtctcctggatttttggaacatctttctcagcctattttgtgtcctaatgattcgctcaataaacatgtttgaatccacacgttaaaaaaaaaaaaaaaaa

SEQ ID NO: 215 - DNA, 1164 bp, Homo sapiens
  source 1..1164: mol_type = genomic DNA
atggggaagattgatgtggacaagatcctctttttcaatcaagaaatcaggctgtggcagcttataatggcaacccctgaagaaaacagcaatccccatgacagagcaacaccccagctgccagcacagctgcaggagcttgagcatcgggtggcccggagacggctgtcccaggcccgccaccgagccaccctggcagcgctcttcaacaacctcaggaagacagtgtactctcagtctgatctcatagcctcaaagtggcaggttctgaataaggcaaagagtcatattccagaactggagcaaaccctggataatttgctgaagctgaaagcatccttcaacctggaagatgggcatgcaagcagcttagaggaggtcaagaaagaatatgccagcatgtattctggaaatgacagttttcctcagaatggttcctccccttggtatctcaacttttacaaacagacgatggaccttctgactggcagcgggatcattaccccgcaggaggcggcgctgcccatcgtctccgcggccatctcccacctgtggcagaacctctcggaggagaggaaggccagcctccggcaggcctgggcgcagaagcaccgcggccctgcgaccctggcggaggcctgccgagagccggcctgtgccgagggcagcgtgaaggacagcggcgtggacagccagggggccagctgctcgctggtctccacgcccgaggagatcctttttgaggatgcctttgatgtggcaagcttcctggacaaaagtgaggttccgagtacatctagctccagttcagtgcttgccagctgcaacccagaaaacccagaggagaagtttcagctctatatgcagatcatcaacttttttaaaggccttagctgtgcaaacactcaagtaaagcaggaagcatcctttcccgttgatgaagagatgatcatgttgcagtgcacagagacctttgacgatgaagatttgtaatgcagaagaggagctgcgaggggagggactgaatgaggtgggcagttcccaaggttgaatgctggcagctaaggttgcacctgccttggcctccaggactctttggagtgggttgttccagaagcattttgatgattttagtttctgattattataaagtataagagaagc

SEQ ID NO: 216 - DNA, 5541 bp, Homo sapiens
  source 1..5541: mol_type = genomic DNA
gcagagttgcgacgctcggcggcatagggggcggctccaccgacactacgcggacgcctcctgccgcagatacacaatcatcatcttactagttctctgtgttgctcgctaaccagtcccccagttcagtagactggagcccagagcctgcttacttgtcaggtgtttattttgtcttgctttttttttttttttaaatgaagtcaaaatgccaataagaccagatctccagcagttggaaaaatgcattgatgatgctttaagaaaaaatgatttcaaacctttgaaaacacttttgcaaattgatatttgtgaagatgtgaagattaaatgcagcaaacagtttttccacaaggtggacaaccttatatgcagggaacttaataaagaggatatccacaatgtttcagccattttggtttctgttggaagatgtggcaaaaatatcagtgtattggggcaagctggacttctaacgatgataaaacaaggactaatacaaaagatggttgcctggtttgaaaaatccaaggacattattcagagtcaaggaaattcaaaagatgaagctgttctaaatatgatagaagacttagttgatcttctgctggtcatacatgatgtcagtgatgaaggtaaaaaacaagtagtggaaagtttcgtacctcgcatttgttccctggttattgactcaagagtgaatatttgtattcagcaagagattataaaaaaaatgaatgctatgcttgacaaaatgcctcaagatgcccggaaaatactctctaaccaagaaatgttaattctcatgagtagtatgggagaaaggattttagatgctggagattatgacttacaggtaggcattgtagaagctttgtgtagaatgaccacagaaaaacaaagacaagaactggcacatcagtggttttcaatggattttattgctaaggcatttaaaagaattaaggactctgaatttgaaacagattgcaggatatttctcaaccttgtaaatggcatgcttggagacaaaagaagggtctttacatttccttgtttatcagcatttcttgataaatatgagctgcaaataccatcagatgaaaaacttgaggaattttggattgattttaatcttgggagtcagactctctcattctacattgctggagataatgatgatcatcaatgggaagcagttactgtgccagaggaaaaagtacaaatatacagcattgaagtgagagaatcaaagaagctactgacaataattctgaaaaatacagtaaaaattagcaaaagagaagggaaagaattgcttttgtattttgacgcatcactagaaatcactaatgtaactcaaaaaatttttggtgcaactaaacatagggaatctatcagaaaacaaggtatttcagttgccaaaacgtcgctgcatatactttttgacgcaagtggatcacagattctagtgccagaaagtcaaatctcaccagtcggagaagagctcgttagtttaaaggaaaaatcaaagtccccaaaggaatttgctaaaccttcaaaatatatcaaaaacagtgacaaagggaatagaaataatagtcagcttgagaaaactactcctagcaaaagaaaaatgtctgaagcatcaatgattgtttctggtgcagatagatacactatgagaagtccagtgcttttcagcaacacatcaataccaccacgaagaagaagaattaaaccaccactgcaaatgacgagctctgcagagaaacctagtgtttctcaaacatcagaaaatagagtggataatgctgcatcactgaaatctagatcatcagaaggaagacatagaagagataatatagacaaacatatcaaaactgctaagtgtgtagaaaacacagaaaataagaatgttgaattcccaaaccaaaattttagtgaactccaggatgttataccagattcacaggcagcggaaaaaagagatcatactatattacctggtgttttagacaacatctgtggaaataaaatacacagcaaatgggcatgttggacacctgtaacaaacattgaactatgtaataaccaaagagcaagtacttcgtcaggagacacattgaatcaagatattgttataaataaaaaacttactaaacaaaaatcatcctcttcaatatctgatcataattctgaaggaacaggaaaagtgaaatataagaaagaacaaaccgaccatatcaaaatagataaagcagaagtagaagtttgcaagaaacacaatcagcaacaaaatcatcctaaatattcagggcagaaaaatactgaaaatgccaagcagagtgattggcctgttgaatctgaaactacttttaaatcggttctcctaaataagacaattgaagaatcgctgatatataggaagaaatacatattgtcaaaagatgtgaatactgctacttgcgataaaaatccatctgctagcaaaaatgtgcaaagtcatagaaaagcagagaaagaattgacttctgagcttaattcctgggattcgaaacaaaaaaaaatgagagaaaagtcaaaagggaaagaatttaccaatgtagcagaatccttgataagccaaatcaataaaagatacaaaacaaaagatgacatcaagtctacaagaaaattaaaggagtctttgattaacagtggtttttcaaacaaacctgttgtacaactcagtaaggaaaaagttcagaaaaaaagctacagaaaactgaagactacctttgttaatgttacttctgaatgcccagtgaatgatgtttacaattttaatttgaatggagctgatgaccctatcataaaacttggaatccaagagtttcaagctacagctaaagaagcttgtgcggataggtcaattagattggtaggtccaaggaatcatgatgaacttaaatcttctgtcaaaacaaaagataaaaaaattataacaaatcatcaaaagaaaaatctgtttagtgatactgaaacagagtacagatgtgatgacagcaagactgatattagctggctaagagaaccgaaatcaaaaccacagctaatagactatagcagaaataaaaatgtgaagaatcataaaagtggaaaatcaagatcatccttggaaaagggacagccaagctctaaaatgacacccagtaaaaatatcacaaaaaagatggacaagacaattccggaaggaagaatcagacttccacgaaaagcaaccaaaacaaaaaaaaactataaagatctctcaaattcagaatcagagtgtgaacaagaattttcacattcatttaaagagaacataccagtaaaggaggagaatatccattccagaatgaaaacggtaaagctaccaaagaaacaacagaaagtcttctgtgctgaaacagaaaaggaactatcaaaacaatggaaaaactcatctctactaaaagatgctatacgagataattgccttgacttatctcccagatctttatctggcagtccatcatctatagaagtaacgagatgtatagagaaaataacagaaaaggattttactcaggattatgactgcataacaaaatctatatcaccttatccaaaaacttcatcacttgaatccttaaatagtaacagtggagttggaggtacaataaagtcacccaaaaacaatgagaaaaacttcctgtgtgcaagtgaaagttgttcaccaattccacgaccactgtttttgcccagacatactccaactaagagtaatactattgtaaatagaaaaaaaataagttctctggtacttacacaagaaacacaaaacagtaacagctattcagatgtaagcagttatagttcagaagaacggtttatggaaattgaatctccacatatcaatgaaaattatatacaaagcaaaagagaggaaagtcatttagcatcttcattatccaagtctagtgaaggaagagagaaaacgtggtttgacatgccctgtgatgctactcatgtatcaggccccacccaacatcttagtcgcaaaagaatatatatagaagataatctaagtaattccaatgaagtagaaatggaagagaaaggagaaaggagagcaaacttgcttcccaaaaaactgtgtaaaattgaagatgcagatcatcatatccacaaaatgtctgaaagtgtatcttcattatcaacaaatgacttttctattccttgggagacctggcaaaatgaatttgcagggatagagatgacttatgagacttacgagaggctcaattcagaatttaagagaaggaataatatccgacataaaatgttgagttattttactacgcagtcttggaaaacagctcagcaacatctgagaacaatgaatcatcaaagtcaggactctaggattaaaaaacttgataaattccaattcattatcatagaggagctggagaattttgaaaaagattcacagtctttaaaagatttggaaaaggaatttgtggacttttgggaaaagatatttcagaagttcagtgcatatcaaaaaagcgaacaacagaggcttcatcttttgaaaacttcattggctaaaagtgtcttctgtaatactgatagtgaagaaactgtttttacatccgagatgtgtttgatgaaagaagatatgaaagtgctgcaagacaggcttcttaaggacatgctagaagaggagcttcttaatgtacgcagagaactgatgtcagtattcatgtctcatgaaagaaatgctaatgtgtgaaatctagtttttatcaccatactttatctaattattattctctgtatataactgaggaaataagaatagtcctacaaagagaaaaatatacatgtcaccgaagcaagtgtaccctttataggaaccctcaaattaaaaaaaaatgtcttttaatggatgagagggaaccactataacatgagtccaagcccagaagacttctgtctatacaatatttttttttaattttggagataaaagctttaagaaactttttgagttaattatactcataaaatgagtttctttaataaattaaattttattgtgtaaaatgtattattacataaaatgtgtttttgaatcaatgcagtttggggatgaatataattaaaatatgtttaataacttagaattcaactaataaaaatttagccacacttacaagggggaggaagtccctagtttaaaatgtataactgagtggtagatcagtactttcagcacactgttggaaacatttattcagatatggctctaatgtattaggaagcactaaatggcctaaaaaagctactacattgcctaaatatgttaattcaatatagaagtcctatttcataaccaggctgtttgacaaatacttttaatctagtagtcattgtaatatcttgctagattaatttataaaaatgagtatacatttgatttgcttttaatgaagttgaaataaatgcttatgtcacttgaataaatataaa

SEQ ID NO: 217 - DNA, 1119 bp, Homo sapiens
  source 1..1119: mol_type = genomic DNA
agaagcgtcgcggagaaggggccacctcaggtgaagcgcgcttgtggaggagttgtggaggacgcctgtcgacgaccagtaactggtcctcggccattgcggtgtgtttcagtcaggaagcatctaaatatggtgtcctccggaaaaaagtattccaggaaatctgggaagccgtctgtggaagatcagtttacgagagcctatgactttgagactgaagataagaaagatctgagtggatcagaggaagatgttattgaagggaagactgcagtcattgagaaacgtaggaagaaaaggtcttctgcaggagtagttgaagatatggggggtgaagtgcagaatatgctggaaggagttggagttgacattaacaaggctcttcttgccaagagaaagagactagaaatgtataccaaggcttctctcaaaactagtaaccagaaaattgaacatgtttggaaaacacaacaagatcaaaggcagaagcttaaccaagaatattctcagcagtttctgactttgtttcagcagtgggatttagatatgcagaaagctgaggaacaagaagaaaaaatacttaatatgtttcgacagcaacaaaagattcttcaacaatctagaattgttcagagccagagattgaaaacaattaaacagttatatgagcagttcataaagagtatggaagagttggagaagaatcatgataatctacttactggtgcacaaaatgaatttaaaaaagaaatggctatgttgcaaaaaaaaattatgatggaaactcagcagcaagagatagcaagtgttcggaagtctcttcaatccatgttattctgatgactctttgaagaaagaacttgaacctaagtaatatgatacaattataacgttagctaagaagcatattgtaagtctttagaatagtttaattgtaacatctttaatcataaacctgtttcattgtaagacctccctttctgttaagtcaaatctaaatagttatgagttagttagcaactattcctaaagaatatgtattaagctttcagctctttagtaatgatagtgaatttttctctctaacactgtcaattaaataaagacgatttaatttta

SEQ ID NO: 218 - DNA, 1137 bp, Homo sapiens
  source 1..1137: mol_type = genomic DNA
agcttgcctcagaagcgtcgcggagaaggggccacctcaggtgaagcgcgcttgtggaggagttgtggaggacgcctgtcgacgaccagtaactggtcctcggccattgcggtgtgtttcaggaagcatctaaatatggtgtcctccggaaaaaagtattccaggaaatctgggaagccgtctgtggaagatcagtttacgagagcctatgactttgagactgaagataagaaagatctgagtggatcagaggaagatgttattgaagggaagactgcagtcattgagaaacgtaggaagaaaaggtcttctgcaggagtagttgaagatatggggggtgaagtgcagaatatgctggaaggagttggagttgacattaacaaggctcttcttgccaagagaaagagactagaaatgtataccaaggcttctctcaaaactagtaaccagaaaattgaacatgtttggaaaacacaacaagatcaaaggcagaagcttaaccaagaatattctcagcagtttctgactttgtttcagcagtgggatttagatatgcagaaagctgaggaacaagaagaaaaaatacttaatatgtttcgacagcaacaaaagattcttcaacaatctagaattgttcagagccagagattgaaaacaattaaacagttatatgagcagttcataaagagtatggaagagttggagaagaatcatgataatctacttactggtgcacaaaatgaatttaaaaaagaaatggctatgttgcaaaaaaaaattatgatggaaactcagcagcaagagatagcaagtgttcggaagtctcttcaatccatgttattctgatgactctttgaagaaagaacttgaacctaagtaatatgatacaattataacgttagctaagaagcatattgtaagtctttagaatagtttaattgtaacatctttaatcataaacctgtttcattgtaagacctccctttctgttaagtcaaatctaaatagttatgagttagttagcaactattcctaaagaatatgtattaagctttcagctctttagtaatgatagtgaatttttctctctaacactgtcaattaaataaagacgatttaattttaaaaaaaaaaaaa

SEQ ID NO: 219 - DNA, 1119 bp, Homo sapiens
  source 1..1119: mol_type = genomic DNA
agcttgcctcagaagcgtcgcggagaaggggccacctcaggtgaagcgcgcttgtggaggagttgtggaggacgcctgtcgacgaccagtaactggtcctcggccattgcggaagcatctaaatatggtgtcctccggaaaaaagtattccaggaaatctgggaagccgtctgtggaagatcagtttacgagagcctatgactttgagactgaagataagaaagatctgagtggatcagaggaagatgttattgaagggaagactgcagtcattgagaaacgtaggaagaaaaggtcttctgcaggagtagttgaagatatggggggtgaagtgcagaatatgctggaaggagttggagttgacattaacaaggctcttcttgccaagagaaagagactagaaatgtataccaaggcttctctcaaaactagtaaccagaaaattgaacatgtttggaaaacacaacaagatcaaaggcagaagcttaaccaagaatattctcagcagtttctgactttgtttcagcagtgggatttagatatgcagaaagctgaggaacaagaagaaaaaatacttaatatgtttcgacagcaacaaaagattcttcaacaatctagaattgttcagagccagagattgaaaacaattaaacagttatatgagcagttcataaagagtatggaagagttggagaagaatcatgataatctacttactggtgcacaaaatgaatttaaaaaagaaatggctatgttgcaaaaaaaaattatgatggaaactcagcagcaagagatagcaagtgttcggaagtctcttcaatccatgttattctgatgactctttgaagaaagaacttgaacctaagtaatatgatacaattataacgttagctaagaagcatattgtaagtctttagaatagtttaattgtaacatctttaatcataaacctgtttcattgtaagacctccctttctgttaagtcaaatctaaatagttatgagttagttagcaactattcctaaagaatatgtattaagctttcagctctttagtaatgatagtgaatttttctctctaacactgtcaattaaataaagacgatttaattttaaaaaa

SEQ ID NO: 220 - DNA, 4354 bp, Homo sapiens
  source 1..4354: mol_type = genomic DNA
acctctgctcccggaaccgcagcgccaaagctgccgctgagcccctgggggatgcccgccggcctcaccgaacccgccggcgccgctcccccggctgctgtgagcgcctcggggaccgtgaccatggccccggccggggcgctgccggtgcgggtggagagcactccggtggccctgggcgccgtgactaaggctcctgtcagcgtctgcgtggagcccacggcgtcccagcccctgcggtcccccgtggggaccctggtgaccaaagtggctccggtcagcgcccctcctaaagtcagcagcggccctaggctgcctgctcctcagatagtcgccgtgaaagcccccaacaccacgacaatccagtttcctgctaatttgcagcttcctccaggaaccgttttgattaaaagtaacagtggtccgttgatgttggtatctcctcagcaaactgtaacaagagccgagaccacaagtaacataacctcaaggccagcagtaccagcgaatcctcaaacagtcaaaatctgtacagtgccgaactctagctcacaattaatcaagaaagtggcagtgacacctgttaaaaaattggcacaaataggaactactgtggtaaccactgttccgaagccttcctcagtacaatctgtggctgtgccaaccagtgtcgtcacagttactcctggaaagccattgaatactgtaactaccctgaagccttcaagtttgggagcatcatccactccttcaaatgagcccaatcttaaagcagagaactcagcagctgttcagattaatctttctccgacaatgctagaaaatgtgaagaaatgcaagaacttccttgcaatgttaataaaactagcatgtagtggatcacagtccccagaaatggggcaaaatgtgaagaagctggtggaacaacttttggatgcaaaaatcgaagcagaagaatttactaggaaactgtatgttgaactcaagtcttcacctcagcctcacctggttccttttcttaagaaaagcgtggttgccttacgacaacttctgcctaactcccagagcttcatccagcaatgtgttcagcagacttctagtgacatggtcattgctacctgtactacaacagtaacaacttctcctgtggtgacaactacagtgtcctcaagccagtctgaaaagtcaattattgtttctggagcaacagcacccagaactgtgtcagtgcaaactttgaacccacttgctggtccagtgggagcaaaagctggagttgtgacacttcattctgtgggcccaactgctgcaacaggaggaacaacagctggaactggtttgcttcagacttcaaaaccacttgtgacatctgtggcaaacacagtgaccacggtctcactgcaacctgaaaagccagttgtctctggaacagcagtaacactgtcccttccagcagtaacttttggagaaacttcaggtgcagctatttgtcttccatctgtgaaacctgttgtttcttctgctgggaccacatctgacaagcctgttattgggactccagttcaaatcaaacttgcccagccgggccctgtcctttcacaaccagctgggattccacaggcagttcaagtcaagcaactattctcattgtttcaggtagttcagcagccttcaggaggcaatgaaaaacaagtgaccacaatttcacattcctcaacattgaccattcagaaatgtggacagaagacgatgccagtgaacaccataatacctactagtcagtttcctccagcttccattctaaagcaaattactctgcctggaaataaaattctgtcacttcaagcatctcctactcagaaaaatagaataaaagagaatgtaacatcatgcttccgagatgaggatgacatcaatgatgtgacttctatggcaggggtcaaccttaatgaagaaaatgcctgcatcttagcaacaaactctgaattggttggcacactcattcagtcatgtaaagatgaaccatttctttttattggagctctacaaaagagaattttagacattggtaaaaagcatgacattacagaacttaactctgatgctgtgaacttgatctcccaagcaacacaggaacgactacgaggccttctagaaaaactgactgcaattgctcagcatcgaatgactacttacaaggcaagtgaaaattacatcctgtgtagtgataccaggtcacagctcaaatttcttgaaaagctggatcaattggagaagcagagaaaggatttggaagaaagagaaatgttacttaaggcagccaagagtcgttctaataaagaagatccagaacagctgagattaaagcagaaagccaaagagttacagcaattggaacttgcacagatacagcatagagacgctaatctcacagctcttgcagctattggaccaaggaagaagagaccactagaatctggaattgagggcttaaaagacaaccttcttgcttctgggacatccagcctgacagccaccaaacagttgcatcgtccaagaatcacgagaatctgcctcagggacttgatattttgtatggaacaggaacgggagatgaagtattctcgagctctatacctggcccttctgaagtgaccactccactcttccatccagatccttgctatttactgccaaagaagacacaaagcattgttgcactgtcctgaaatttcaatttctggaaaataatcaccaacatgaaagagcattgtttacagttagaaactttattaactcttacctatccatctcatgggactcttacagactcagattcatctttgtcttctgaaaatcagttatgaaatacactttgcacagaattaggcatctgcctatctgtgcattaaattaaagcaagttaaggccctatttgttactacctgcctcatttgccaaattgtagcaggtgaggtgtccttccctaatacagcatgcattgagatgcaggagaaaggaagaggcataagaaaatacaagaatgactatttcattctatattgaacctgtcccaaagtggtaggttttctgggctggaatcagaagttgcttagctaactatgacagtcaccctctgtacgtgacaggccactgtggtgactttggtcggctgagttccagtgttgtcaaaacaagacaaatggggatagattgtgcctggggttgctaattctctgcttcatatcaccatatgccgtttctggtaccaagtgaggggacatgcttgtcagggaaaccttaaaattgaatctactgatatatcttgttgaaaaaatggaaaaggtgcaaagtattagaaggaacgttagggcgttgctttcaaactgatgaggggaatgtgaaaatggtatcataaaacaggaaatgtgcttcatatgcccaagaggggaagaggtggaatcggaactccaaaacaactggtacatgttttgttgatgggcaaaaaaaatcacagcacaaccagaaaggagaatgtaccagatgttttcaaattagagtatttcaaaaggaaaatgttattttttgttttgtattgttttaaatcccaaggatagtttttatagttccttctgtcataatatattttagttatcctaatttttaagcatgttggcacatttaaaaaatcctaattgatgatgagaaatttttaacaataggactttatgttggattctgtacttaaaaggtactgtcaatatctcactcttggggatatgagctctaaatatgagaagcaagttatatgtgttcacctgaggaagaagctgacggacaaagcaaaccctctttaaaaaaaaaaaaaagaaaattccacgtgtgtggaatacagccggtgaaaaataatcactgtagttagaatcacatacagaaaaaaaatgattgaatcctccaagaaggtatttcaaaaatgggaaatgctatacttataagaattgaaggaaaaaaaaaaaaacacctcacgtatgttattcttcatcctgttcttcccattgggactgttatggccatattctacagtatagtaaattttaaattggccacatttttttttgtttcagcaagttatgtaaaatgctataaattatgtgtatgttaaaggagtactttaagaagagatctttatccaaagttgtttttgtatatttaaatgcttacctttattttttgtaaagtgcagcatactcatttgtgtataatcttactgatcagatgtttaaaattattccaaatacttcattaaaataattattttattataagaaaaaaaaaaaaaaaaaaaaaaaaaaaa

SEQ ID NO: 221 - DNA, 4339 bp, Homo sapiens
  source 1..4339: mol_type = genomic DNA
acctctgctcccggaaccgcagcgccaaagctgccgctgagcccctgggggatgcccgccggcctcaccgaacccgccggcgccgctcccccggctgctgtgagcgcctcggggaccgtgaccatggccccggccggggcgctgccggtgcgggtggagagcactccggtggccctgggcgccgtgactaaggctcctgtcagcgtctgcgtggagcccacggcgtcccagcccctgcggtcccccgtggggaccctggtgaccaaagtggctccggtcagcgcccctcctaaagtcagcagcggccctaggctgcctgctcctcagatagtcgccgtgaaagcccccaacaccacgacaatccagtttcctgctaatttgcagcttcctccaggaaccgttttgattaaaagtaacagtggtccgttgatgttggtatctcctcagcaaactgtaacaagagccgagaccacaagtaacataacctcaaggccagcagtaccagcgaatcctcaaacagtcaaaatctgtacagtgccgaactctagctcacaattaatcaagaaagtggcagtgacacctgttaaaaaattggcacaaataggaactactgtggtaaccactgttccgaagccttcctcagtacaatctgtggctgtgccaaccagtgtcgtcacagttactcctggaaagccattgaatactgtaactaccctgaagccttcaagtttgggagcatcatccactccttcaaatgagcccaatcttaaagcagagaactcagcagctgttcagattaatctttctccgacaatgctagaaaatgtgaagaaatgcaagaacttccttgcaatgttaataaaactagcatgtagtggatcacagtccccagaaatggggcaaaatgtgaagaagctggtggaacaacttttggatgcaaaaatcgaagcagaagaatttactaggaaactgtatgttgaactcaagtcttcacctcagcctcacctggttccttttcttaagaaaagcgtggttgccttacgacaacttctgcctaactcccagagcttcatccagcaatgtgttcagcagacttctagtgacatggtcattgctacctgtactacaacagtaacaacttctcctgtggtgacaactacagtgtcctcaagccagtctgaaaagtcaattattgtttctggagcaacagcacccagaactgtgtcagtgcaaactttgaacccacttgctggtccagtgggagcaaaagctggagttgtgacacttcattctgtgggcccaactgctgcaacaggaggaacaacagctggaactggtttgcttcagacttcaaaaccacttgtgacatctgtggcaaacacagtgaccacggtctcactgcaacctgaaaagccagttgtctctggaacagcagtaacactgtcccttccagcagtaacttttggagaaacttcaggtgcagctatttgtcttccatctgtgaaacctgttgtttcttctgctgggaccacatctgacaagcctgttattgggactccagttcaaatcaaacttgcccagccgggccctgtcctttcacaaccagctgggattccacaggcagttcaagtcaagcaactagtagttcagcagccttcaggaggcaatgaaaaacaagtgaccacaatttcacattcctcaacattgaccattcagaaatgtggacagaagacgatgccagtgaacaccataatacctactagtcagtttcctccagcttccattctaaagcaaattactctgcctggaaataaaattctgtcacttcaagcatctcctactcagaaaaatagaataaaagagaatgtaacatcatgcttccgagatgaggatgacatcaatgatgtgacttctatggcaggggtcaaccttaatgaagaaaatgcctgcatcttagcaacaaactctgaattggttggcacactcattcagtcatgtaaagatgaaccatttctttttattggagctctacaaaagagaattttagacattggtaaaaagcatgacattacagaacttaactctgatgctgtgaacttgatctcccaagcaacacaggaacgactacgaggccttctagaaaaactgactgcaattgctcagcatcgaatgactacttacaaggcaagtgaaaattacatcctgtgtagtgataccaggtcacagctcaaatttcttgaaaagctggatcaattggagaagcagagaaaggatttggaagaaagagaaatgttacttaaggcagccaagagtcgttctaataaagaagatccagaacagctgagattaaagcagaaagccaaagagttacagcaattggaacttgcacagatacagcatagagacgctaatctcacagctcttgcagctattggaccaaggaagaagagaccactagaatctggaattgagggcttaaaagacaaccttcttgcttctgggacatccagcctgacagccaccaaacagttgcatcgtccaagaatcacgagaatctgcctcagggacttgatattttgtatggaacaggaacgggagatgaagtattctcgagctctatacctggcccttctgaagtgaccactccactcttccatccagatccttgctatttactgccaaagaagacacaaagcattgttgcactgtcctgaaatttcaatttctggaaaataatcaccaacatgaaagagcattgtttacagttagaaactttattaactcttacctatccatctcatgggactcttacagactcagattcatctttgtcttctgaaaatcagttatgaaatacactttgcacagaattaggcatctgcctatctgtgcattaaattaaagcaagttaaggccctatttgttactacctgcctcatttgccaaattgtagcaggtgaggtgtccttccctaatacagcatgcattgagatgcaggagaaaggaagaggcataagaaaatacaagaatgactatttcattctatattgaacctgtcccaaagtggtaggttttctgggctggaatcagaagttgcttagctaactatgacagtcaccctctgtacgtgacaggccactgtggtgactttggtcggctgagttccagtgttgtcaaaacaagacaaatggggatagattgtgcctggggttgctaattctctgcttcatatcaccatatgccgtttctggtaccaagtgaggggacatgcttgtcagggaaaccttaaaattgaatctactgatatatcttgttgaaaaaatggaaaaggtgcaaagtattagaaggaacgttagggcgttgctttcaaactgatgaggggaatgtgaaaatggtatcataaaacaggaaatgtgcttcatatgcccaagaggggaagaggtggaatcggaactccaaaacaactggtacatgttttgttgatgggcaaaaaaaatcacagcacaaccagaaaggagaatgtaccagatgttttcaaattagagtatttcaaaaggaaaatgttattttttgttttgtattgttttaaatcccaaggatagtttttatagttccttctgtcataatatattttagttatcctaatttttaagcatgttggcacatttaaaaaatcctaattgatgatgagaaatttttaacaataggactttatgttggattctgtacttaaaaggtactgtcaatatctcactcttggggatatgagctctaaatatgagaagcaagttatatgtgttcacctgaggaagaagctgacggacaaagcaaaccctctttaaaaaaaaaaaaaagaaaattccacgtgtgtggaatacagccggtgaaaaataatcactgtagttagaatcacatacagaaaaaaaatgattgaatcctccaagaaggtatttcaaaaatgggaaatgctatacttataagaattgaaggaaaaaaaaaaaaacacctcacgtatgttattcttcatcctgttcttcccattgggactgttatggccatattctacagtatagtaaattttaaattggccacatttttttttgtttcagcaagttatgtaaaatgctataaattatgtgtatgttaaaggagtactttaagaagagatctttatccaaagttgtttttgtatatttaaatgcttacctttattttttgtaaagtgcagcatactcatttgtgtataatcttactgatcagatgtttaaaattattccaaatacttcattaaaataattattttattataagaaaaaaaaaaaaaaaaaaaaaaaaaaaa

SEQ ID NO: 222 - DNA, 2371 bp, Homo sapiens
  source 1..2371: mol_type = genomic DNA
attttacaaccccaacgaggtgggccatggagtgccccgagggacagctccccatttcttcagaaaatgattcaacaccaacagtttcaacatcggaagtaactagccaacaagaaccccaaattcttgtcgaccgtgggtctgaaaccacctatgaaagcagcgccgacattgctggcgacgaaggcacccagattcctgccgacgaggacactcaaacggatgcggacagcagcgcccaggctgctgcccaggccccagaaaacttccaggaagggaaagacatgagtgaaagccaggatgaagttcctgatgaagttgagaaccagtttatattgcgtctgcctctggaacatgcttgtactgtcaggaacctagcacgttctcaaagtgtcaagatgaaggataaactaaaaattgacttattgcctgatgggcgccatgcagttgttgaagtagaagatgtcccactagctgctaagctggttgacttgccttgtgttattgaaagcctgagaacgcttgataaaaaaaccttttataaaacagcagacatttctcagatgcttgtgtgcactgctgatggtgatatccacctttctccagaagaaccagctgcctctactgatcctaatatagtcaggaaaaaagaaagggggagagaagaaaaatgtgtctggaagcatggcattacgccaccacttaagaatgtcagaaagaaaaggttccggaaaacacaaaaaaaggtccctgatgtcaaagaaatggaaaaaagcagctttactgagtacattgaatctccagacgtggaaaatgaagtaaagagactgctgcgttcggatgctgaagccgtaagtacccgttgggaagtcattgctgaagatggaaccaaggaaatagaaagtcaaggctccatcccaggatttttgatatcctcgggaatgagcagccacaagcagggtcatacctcgtcagaatatgatatgcttcgggagatgttcagtgattctagaagtaacaatgatgatgatgaggatgaggatgatgaagatgaggatgaggatgaggatgaggatgaagatgaagacaaagaagaggaggaggaagattgttctgaagagtatctggaaaggcagctgcaggccgagtttattgaatctggccagtatagggcaaatgaaggtaccagttcaatagtcatggaaattcagaagcagattgagaaaaaggagaaaaagctccataagattcagaataaagcacaaagacagaaggatctcatcatgaaagtggaaaacctgacactcaagaatcattttcagtctgtgctggagcagcttgagttacaggaaaaacaaaaaaatgagaagctcatttccctacaggaacagttgcagcgttttctgaagaagtgaggagagccattggcgtggcccacaaaccttggattcaccatccagactgcagattggatgaaactgtgcacgtttttgtcccttcagttgccttatgttgaatcagttatatttatctgtaccttctttgctacttaaaatatgctcacagtttgtagtcatgtagaaaaggccagtataaaaatgtagtagacttaaagaccccactcgaccatgagactttctctttgtcaatttgggaattattattattaatttagaaatggggtcttgttatgttgcccaggctgaattcagactcctgggcttaagggatccttccgcctcagcctcctgagtagctgggactacagttgtgcaccaccacaccaaacaagaattgattatattgcttctgtgctatggtaccagcagattattcagccatgcttctaaaggcagtctagcctagaggccgtacagctgtttggtttgcatatgttttagcttttcttttggtttttagtatttcctaaaacataggggaaaaaacgaggtcatttctactaagcactaggacctgccatagtgagtttaagtgcctaccttgcagcagttaatactagattgtgttctgtctctgttcaggtaacaggactgcattcctgctcaaggatgattccttgctgctgcttatgttctgttgtttttaggatggagctggttgttattcaccaactaagggaacagttagagcagagatgaagaaattatgaactgttatccttattctgagccttctcctcctaaccctcatcagttaaggttaggaagaacaagatgccataatgcctatgaagacttctttaacaatcttgtttgggtttttttctaggtatattattagtgttttatggtctatgttctttaagcaataaataaattgttcattttaaatggaaaaaaaaaaaaaaaaa

SEQ ID NO: 223 - DNA, 2203 bp, Homo sapiens
  source 1..2203: mol_type = genomic DNA
agcgttcgcctctacgttccgcgcgggagcccacgcgcggttcgtccggaacccacagaccagagacgcaggtcccagccttttcggtgtcggcgccagttcccggaggagcggacatgagtgaaagccaggatgaagttcctgatgaagttgagaaccagtttatattgcgtctgcctctggaacatgcttgtactgtcaggaacctagcacgttctcaaagtgtcaagatgaaggataaactaaaaattgacttattgcctgatgggcgccatgcagttgttgaagtagaagatgtcccactagctgctaagctggttgacttgccttgtgttattgaaagcctgagaacgcttgataaaaaaaccttttataaaacagcagacatttctcagatgcttgtgtgcactgctgatggtgatatccacctttctccagaagaaccagctgcctctactgatcctaatatagtcaggaaaaaagaaagggggagagaagaaaaatgtgtctggaagcatggcattacgccaccacttaagaatgtcagaaagaaaaggttccggaaaacacaaaaaaaggtccctgatgtcaaagaaatggaaaaaagcagctttactgagtacattgaatctccagacgtggaaaatgaagtaaagagactgctgcgttcggatgctgaagccgtaagtacccgttgggaagtcattgctgaagatggaaccaaggaaatagaaagtcaaggctccatcccaggatttttgatatcctcgggaatgagcagccacaagcagggtcatacctcgtcagaatatgatatgcttcgggagatgttcagtgattctagaagtaacaatgatgatgatgaggatgaggatgatgaagatgaggatgaggatgaggatgaggatgaagatgaagacaaagaagaggaggaggaagattgttctgaagagtatctggaaaggcagctgcaggccgagtttattgaatctggccagtatagggcaaatgaaggtaccagttcaatagtcatggaaattcagaagcagattgagaaaaaggagaaaaagctccataagattcagaataaagcacaaagacagaaggatctcatcatgaaagtggaaaacctgacactcaagaatcattttcagtctgtgctggagcagcttgagttacaggaaaaacaaaaaaatgagaagctcatttccctacaggaacagttgcagcgttttctgaagaagtgaggagagccattggcgtggcccacaaaccttggattcaccatccagactgcagattggatgaaactgtgcacgtttttgtcccttcagttgccttatgttgaatcagttatatttatctgtaccttctttgctacttaaaatatgctcacagtttgtagtcatgtagaaaaggccagtataaaaatgtagtagacttaaagaccccactcgaccatgagactttctctttgtcaatttgggaattattattattaatttagaaatggggtcttgttatgttgcccaggctgaattcagactcctgggcttaagggatccttccgcctcagcctcctgagtagctgggactacagttgtgcaccaccacaccaaacaagaattgattatattgcttctgtgctatggtaccagcagattattcagccatgcttctaaaggcagtctagcctagaggccgtacagctgtttggtttgcatatgttttagcttttcttttggtttttagtatttcctaaaacataggggaaaaaacgaggtcatttctactaagcactaggacctgccatagtgagtttaagtgcctaccttgcagcagttaatactagattgtgttctgtctctgttcaggtaacaggactgcattcctgctcaaggatgattccttgctgctgcttatgttctgttgtttttaggatggagctggttgttattcaccaactaagggaacagttagagcagagatgaagaaattatgaactgttatccttattctgagccttctcctcctaaccctcatcagttaaggttaggaagaacaagatgccataatgcctatgaagacttctttaacaatcttgtttgggtttttttctaggtatattattagtgttttatggtctatgttctttaagcaataaataaattgttcattttaaatggaaaaaaaaaaaaaaaaa

SEQ ID NO: 224 - DNA, 3389 bp, Homo sapiens
  source 1..3389: mol_type = genomic DNA
gttctgcaagagctggaagctccagttggggtaaggaggctcccatcccgagcttgcgtagtggttctgtgtggcgctgaggaatttggaaacctcaaatggctaaactattacaacctccacccaagttcctgccctcagagtggcacattgctaacaagaaccagtaccacagagcagacgctcaaaggtcccgatcagaacgcctggtcgcagaaagccagaggcttgtggatgaaattgaaaagaccacaagaaaatctcaaagcgatgtgaacaagaaactagaacagagactcgaggaagtccagttctggaagaaggagttagatgacaaacttgagcagcttgtgaatgtaactgatgatctactcatatataagatcagattggaaaaagccctggagaccttgaaagagcccttgcacatcactgagacatgcctggcatacagggagaagcgcattggcattgacctggtgcacgacacagtggagcatgagctgataaaggaggctgagatcatccagggcattatggctctgctgacccgtaccttggaggaggcttccgagcagattcggatgaaccgctctgccaagtacaatcttgagaaggatttgaaggacaagtttgtggccctgaccatagatgatatctgcttctcgctcaacaacaactcaccaaacatcagatattctgagaacgccgtgaggattgagccaaactccgtgagtctggaagactggttggacttctccagcaccaatgtggagaaggctgacaagcagcggaacaactccctgatgctgaaagccctggtggatcgaatcctgtcccagacagccaatgatctgcgcaagcagtgtgatgtggtggacacggcattcaagaatgggctgaaggatacaaaggatgccagggacaagctggctgatcatctggccaaggtcatggaagagattgcttcccaggagaaaaatattacagctcttgaaaaggccatccttgaccaagaagggccagccaaggtggctcatacgcgcttggagaccaggacacaccggccgaacgtggagctgtgtcgtgatgtcgcacaatataggctaatgaaggaggttcaagagatcacccacaatgtcgcaagattgaaggaaactttagcccaagctcaggcagagctgaaagggctgcatcgcagacagcttgccctgcaggaggagatccaggtcaaagagaacaccatttatatcgacgaagtgctgtgtatgcagatgaggaaatccatcccacttcgggatggggaagaccatggggtctgggctgggggcctccgccctgatgctgtctgctaatagtagggctagttccaattctcattaaaccacattgtaaacagtagttacagtagtacagagctctcatttcaggctggcggggcctctagccagcctgctgcaacctcttggctggcattccaagcctgctcagggggctgattttggggcgagtttcttctcttatgctggtgtggtgtttgcctaacaattcaactccatattttagcacaggccactcttacaatatcacaggacttggggccccaggacagggtttcaagacatttcagttcagattcaattcaataaagtagttgggctggatcacctgtgtagaccatgcccctcttgctcatgagatgggatgctaacctttctcttggctctcaaaatttcttttctctagaaaataatgtgttttttttctcttaaatactcaaataacataaagaaaaagaacaaaattccattcattcaagtcaatgggttcaagtcaatggttaagactgtaggttccggagtctgccatctgagtataggacctccaatagtccccactcacagggctataggggcgttgaatgagatcacctccgtaaagggcttcatactgagcctgtatcatggggcagtgagtgtttaatgaatgtgagccattgtgagcagtcccaccctataccaacataatttctgcacaattgtactcatggcataaactcaatttcaggattatttttttccttcactgctaattattgcaagcctttgttcatgttgctaaattgtctttataattattttaatggttacgtacctctttacaagttttcagcaagactgttttatatacttactgtttcttttccaaaaagagttcaacttgtgggaggctgccttccgctgagctgcagcaggtcagagatctatgtgggtgactgtcaaaggaagacatttgctgtgggaaactgctcatttgttccttattccgctaacattgaaggaacactttccatggacgaggcttaccatctcagcaccctcccatgtgtgaagctgctgctacactctgctaacatttggttccccggtgctcatggacagctgacggtgtggggctcaggagacctagcttctagttgcaacactgccaggaaagtttctctccttctttaggaccacctgtaaagtaaggaaaggactatatcgtctggaactcttcctgtccttgctgttccctgaatctggctgtctagctgcacatacggtgtcatagggcacaatgataatgcagagtgtgggcctaattcctgggagctttgcaatctaggtgctccttggtccagagactctttgccatcagaaagggatgttcccaatctgggatggagaaaccccctttgaggccaaaagcactggcttaattctgttaattctgatctatgccaccccagtgctgaacgtctcctctcagagtgctcagcaaatacacagcccttcccatgcctcaatcaaggagggaggcccctctctgctcactgggaagcctctgggtgcttttctgctctggctcggaagagtccaaataagccttcccagctcactgggcagacctcagagtttctgctaacttagcagggttttgaggtctgtcccagaggatgtggctggcagggtgtgaagacactgggcaaaatccttccttgtgaatacagctctcagaggcagccagcctcagtggtggattcagatcccaggctctgcagggagatgtgattcagatcagctggtggatcagctccacgctctacctgtgatgtgatccccgccaagttactcaacttccccgagcttcagttgcctaatctgtaaataagactaataaagcctagattggcgagataacgtgtggaagactctcaacacagtgtctggaacatgctgcttttaagggaaatgtgattttgattatggttgaggccatttctcaacatgtagacataaaatgcggaaacatctaagatttcaataaagcaatgttttgttagtaaa

SEQ ID NO: 225 - DNA, 4766 bp, Homo sapiens
  source 1..4766: mol_type = genomic DNA
ctgcgcagtctgaggcgtccctcgcgtcgggtggaagagcggctgcgcaacaagtgaacctatggattaaggtgtagccgggcggcccggaggttgagagtgcaagattattctgcgcctgcgcggcccgggtaactttgctggctgctcctaggctcccggctcgccgccatcttgtattggggtttcattgttcccgctgggccgggcggtttagtgtaattgccgccggaggaggaggcggagtaacctctggtcagccgagaaaccccactatcctgtagccataaccgcttaaacgatttgggaggtagtgaagggcagggagctggacctggaggcgccgccgcgacagcagcagccatggaggacgagatgcccaagactctatacgtcggtaacctttccagagatgtgacagaagctctaattctgcaactctttagccagattggaccttgtaaaaactgcaaaatgattatggatacagctggaaatgatccctattgttttgtggagtttcatgagcatcgtcatgcagctgcagcattagctgctatgaatggacggaagataatgggtaaggaagtcaaagtgaattgggcaacaacccctagcagtcaaaagaaagatacaagcaatcatttccatgtctttgttggtgatctcagcccagaaattacaactgaagatataaaagctgcttttgcaccatttggaagaatatcagatgcccgagtggtaaaagacatggcaacaggaaagtctaagggatatggctttgtctcctttttcaacaaatgggatgctgaaaacgccattcaacagatgggtggccagtggcttggtggaagacaaatcagaactaactgggcaacccgaaagcctcccgctccaaagagtacatatgagtcaaataccaaacagctatcatatgatgaggttgtaaatcagtctagtccaagcaactgtactgtatactgtggaggtgttacttctgggctaacagaacaactaatgcgtcagactttttcaccatttggacaaataatggaaattcgagtctttccagataaaggatattcatttgttcggttcaattcccatgaaagtgcagcacatgcaattgtttctgttaatggtactaccattgaaggtcatgttgtgaaatgctattggggcaaagaaactcttgatatgataaatcccgtgcaacagcagaatcaaattggatatccccaaccttatggccagtggggccagtggtatggaaatgcacaacaaattggccagtatatgcctaatggttggcaagttcctgcatatggaatgtatggccaggcatggaaccagcaaggatttaatcagacacagtcttctgcaccatggatgggaccaaattatggagtgcaaccgcctcaagggcaaaatggcagcatgttgcccaatcagccttctgggtatcgagtggcagggtatgaaacccagtgaataaggactccagaatctaaagccagtggcttgaggctacagggagtgtagtaaagccgttgtttacttaaagatttatcaaatcagtcagtgcaaatgtcagatacaatgtatttatttaaaagattcatttttaatcatgaaattacttatcatccacattgttttaaaaagaaacaagatgctggatgtctgccaatttttgccttcattaccttttttgataaagtttctcagatccttgtttcaaacacaaatgcagggattgctgccactttttaactattaagaggcagaaaattgcacaatattgaacttttttccactgaagtagtgtgcagttctagtttgcattcctgatatgatttaaaacatgtaatataaagatgttaaaaaaaaaaaccaaaactgtgcagagtctagaagttgtttgtcatcttcagcttgtgcacaattctgttttaggttaaaaaaaggcattgtttgagctgtcccatctccactgttatccctttggggttttttaatataaattattagtttacatcatttttgtatctacatcttttttcacaaatttgtcttgccttattaaagttctgtaaaatatacttaaatggaaaaaatgatgttcatttagattgaaaacttttctcagatggattgataattgcattcatcttgtgttttatatgagaaggtgcctcaagaatttcctgttggatttgtttaaaaggatttttatctttcgtgataaactttgctgtgtaccaggaactataaaaacaaaaacttgttactaaagaaaatatctgaaatgtgataagttcttatgccatgttaatttcatgtgtcaacttcaacatttacatgtattatttcattatgtaaaatgttttagcaatttaatattttgcacagttagcaaactttgtatgtcatttccttcaaggcatcatgcagagttgacatgagatttataaggttttaagttgtttgcatgtgaaaatcaaatacatactttggtagtctttgaatacaaagtcatctgctcttgtttttcaagaattttgagacacaaagttgtatgtaaaggaatatattaatttgccgttttctaggtagatttgctcaaaaagagtgaatcaacttaatatgtacaaatgatagctgtgaaactgtagaatatctttgtgtcaggcttggagttcattgtgacctccaaattttgcctgaaggaccagctgggcaaagcatcttttaaatgttcagaggccaaaagataaacaaaaaaaaaaccttaaaatcctacctctttaaacagccttcagataagagaatcctcagtgcaatcattattttgattcgtttggtacctgttttcctggagttcccgattttattattttggggtggctccaagcattaagaggtttaatctttgatggcattgttctagttttgaaatttctagtatatttcagagtctcttagaagacttgtgtgggaagtttcactttgttttcagtgaagatcacaaacctccttcttcctttactcaagaggaaaggtcccagtatacatatttgaatggttgatggttttcaagaccttcagggagctccctgcattttacctagaaacagaaaaggcccgcaaaatcttaagtttcctggcctgcatttcccgggtaggggcaaatgactccaagctggtctctaagccaatacccttataaaccagagcccaggaaagacagctcgagtgtataattctctggagctcaattctatgcagttgtgctgatatttcattaagtcactgtgtatttttaagtgttgatacattaaaagtcgctttatggaagatgagtaaattttttaaatacttggaaattttatttccttgttaacttctacagatcagggcatgcaaccaaaagcagcttaaatgaaatattttaaaataaaatatcaggaagctatttttagatttcttctggcttatgtttctactttaggaccctcattgttctcttattaaaaaaaattatttcctgtgcatctcatggactgcagggtaaattatttgggcataaataatttaaatagttttctttcattttgactatctccagtaataacagtttttattatccagcatattggcttattgcacaaatcttaaaatgtacattgactactttctgagaagaaagtggtatcagtactcatgatgaaaaggttactactgaacaaattcacatttcaggaacacctctatctttggtttaaatcttactcttagtttttccgtctaaaaatcatactggtattagtatcaggtaaggaaattaaagtttttaaaatggtttcattctctgcaatatgcaaaatttagattttactttctggtactgtaaagaacctgaagtgatttacacttaatgggtgattaatccagtattctttaccctgaatgtttggatattaaagttcctttatgttttctataacctgtgggatcttcttgcagtgattattgtgtgtgagattttttttctttttggtctatccatattgttatattcactcaggtattttttttttaatcttattccagaatcagtggtttatattgggttactgtttaacaccaaatggaattggcattctgcagatttaattaattatgaaaccagggtctcattttccttgctgatacttgttgaaaatgagattcacattctagtctttattttcctcctgttttgtccctgtgcttgtacatcttccttttatttgtgtgttatagttctattccatttgagaaggcagttggtaagaactagattgcatgtacaaagacaggtttactaagtgctgtacagtggtcctgaggttacagttgaattagaaaaacgaaatgtacttacaggaaataagaaagcaaacctttcaaatgagagtgatgatttctttaaaaaaaatcagtttttttctctcaaataatgttctttatttcacgaaatcgtcaatcttaagcatgagcagggataaacaactcctagaaggaactcaattcattcttcctggattttctctgttgttaaatcacaaaaatgatagtccccaatcgtttctttataggaggttattacatttcattacagtcactgcattttgactgttgtgtttagaatttgaatgtacatccaaaatgatgagtttcaatttaagagccttaataaaatgtgtgagtgtgtctcaattgaa

SEQ ID NO: 226 - DNA, 4634 bp, Homo sapiens
  source 1..4634: mol_type = genomic DNA
gccgccatcttgtattggggtttcattgttcccgctgggccgggcggtttagtgtaattgccgccggaggaggaggcggagtaacctctggtcagccgagaaaccccactatcctgtagccataaccgcttaaacgatttgggaggtagtgaagggcagggagctggacctggaggcgccgccgcgacagcagcagccatggaggacgagatgcccaagactctatacgtcggtaacctttccagagatgtgacagaagctctaattctgcaactctttagccagattggaccttgtaaaaactgcaaaatgattatggatacagctggaaatgatccctattgttttgtggagtttcatgagcatcgtcatgcagctgcagcattagctgctatgaatggacggaagataatgggtaaggaagtcaaagtgaattgggcaacaacccctagcagtcaaaagaaagatacaagcagtagtaccgttgtcagcacacagcgttcacaagatcatttccatgtctttgttggtgatctcagcccagaaattacaactgaagatataaaagctgcttttgcaccatttggaagaatatcagatgcccgagtggtaaaagacatggcaacaggaaagtctaagggatatggctttgtctcctttttcaacaaatgggatgctgaaaacgccattcaacagatgggtggccagtggcttggtggaagacaaatcagaactaactgggcaacccgaaagcctcccgctccaaagagtacatatgagtcaaataccaaacagctatcatatgatgaggttgtaaatcagtctagtccaagcaactgtactgtatactgtggaggtgttacttctgggctaacagaacaactaatgcgtcagactttttcaccatttggacaaataatggaaattcgagtctttccagataaaggatattcatttgttcggttcaattcccatgaaagtgcagcacatgcaattgtttctgttaatggtactaccattgaaggtcatgttgtgaaatgctattggggcaaagaaactcttgatatgataaatcccgtgcaacagcagaatcaaattggatatccccaaccttatggccagtggggccagtggtatggaaatgcacaacaaattggccagtatatgcctaatggttggcaagttcctgcatatggaatgtatggccaggcatggaaccagcaaggatttaatcagacacagtcttctgcaccatggatgggaccaaattatggagtgcaaccgcctcaagggcaaaatggcagcatgttgcccaatcagccttctgggtatcgagtggcagggtatgaaacccagtgaataaggactccagaatctaaagccagtggcttgaggctacagggagtgtagtaaagccgttgtttacttaaagatttatcaaatcagtcagtgcaaatgtcagatacaatgtatttatttaaaagattcatttttaatcatgaaattacttatcatccacattgttttaaaaagaaacaagatgctggatgtctgccaatttttgccttcattaccttttttgataaagtttctcagatccttgtttcaaacacaaatgcagggattgctgccactttttaactattaagaggcagaaaattgcacaatattgaacttttttccactgaagtagtgtgcagttctagtttgcattcctgatatgatttaaaacatgtaatataaagatgttaaaaaaaaaaaccaaaactgtgcagagtctagaagttgtttgtcatcttcagcttgtgcacaattctgttttaggttaaaaaaaggcattgtttgagctgtcccatctccactgttatccctttggggttttttaatataaattattagtttacatcatttttgtatctacatcttttttcacaaatttgtcttgccttattaaagttctgtaaaatatacttaaatggaaaaaatgatgttcatttagattgaaaacttttctcagatggattgataattgcattcatcttgtgttttatatgagaaggtgcctcaagaatttcctgttggatttgtttaaaaggatttttatctttcgtgataaactttgctgtgtaccaggaactataaaaacaaaaacttgttactaaagaaaatatctgaaatgtgataagttcttatgccatgttaatttcatgtgtcaacttcaacatttacatgtattatttcattatgtaaaatgttttagcaatttaatattttgcacagttagcaaactttgtatgtcatttccttcaaggcatcatgcagagttgacatgagatttataaggttttaagttgtttgcatgtgaaaatcaaatacatactttggtagtctttgaatacaaagtcatctgctcttgtttttcaagaattttgagacacaaagttgtatgtaaaggaatatattaatttgccgttttctaggtagatttgctcaaaaagagtgaatcaacttaatatgtacaaatgatagctgtgaaactgtagaatatctttgtgtcaggcttggagttcattgtgacctccaaattttgcctgaaggaccagctgggcaaagcatcttttaaatgttcagaggccaaaagataaacaaaaaaaaaaccttaaaatcctacctctttaaacagccttcagataagagaatcctcagtgcaatcattattttgattcgtttggtacctgttttcctggagttcccgattttattattttggggtggctccaagcattaagaggtttaatctttgatggcattgttctagttttgaaatttctagtatatttcagagtctcttagaagacttgtgtgggaagtttcactttgttttcagtgaagatcacaaacctccttcttcctttactcaagaggaaaggtcccagtatacatatttgaatggttgatggttttcaagaccttcagggagctccctgcattttacctagaaacagaaaaggcccgcaaaatcttaagtttcctggcctgcatttcccgggtaggggcaaatgactccaagctggtctctaagccaatacccttataaaccagagcccaggaaagacagctcgagtgtataattctctggagctcaattctatgcagttgtgctgatatttcattaagtcactgtgtatttttaagtgttgatacattaaaagtcgctttatggaagatgagtaaattttttaaatacttggaaattttatttccttgttaacttctacagatcagggcatgcaaccaaaagcagcttaaatgaaatattttaaaataaaatatcaggaagctatttttagatttcttctggcttatgtttctactttaggaccctcattgttctcttattaaaaaaaattatttcctgtgcatctcatggactgcagggtaaattatttgggcataaataatttaaatagttttctttcattttgactatctccagtaataacagtttttattatccagcatattggcttattgcacaaatcttaaaatgtacattgactactttctgagaagaaagtggtatcagtactcatgatgaaaaggttactactgaacaaattcacatttcaggaacacctctatctttggtttaaatcttactcttagtttttccgtctaaaaatcatactggtattagtatcaggtaaggaaattaaagtttttaaaatggtttcattctctgcaatatgcaaaatttagattttactttctggtactgtaaagaacctgaagtgatttacacttaatgggtgattaatccagtattctttaccctgaatgtttggatattaaagttcctttatgttttctataacctgtgggatcttcttgcagtgattattgtgtgtgagattttttttctttttggtctatccatattgttatattcactcaggtattttttttttaatcttattccagaatcagtggtttatattgggttactgtttaacaccaaatggaattggcattctgcagatttaattaattatgaaaccagggtctcattttccttgctgatacttgttgaaaatgagattcacattctagtctttattttcctcctgttttgtccctgtgcttgtacatcttccttttatttgtgtgttatagttctattccatttgagaaggcagttggtaagaactagattgcatgtacaaagacaggtttactaagtgctgtacagtggtcctgaggttacagttgaattagaaaaacgaaatgtacttacaggaaataagaaagcaaacctttcaaatgagagtgatgatttctttaaaaaaaatcagtttttttctctcaaataatgttctttatttcacgaaatcgtcaatcttaagcatgagcagggataaacaactcctagaaggaactcaattcattcttcctggattttctctgttgttaaatcacaaaaatgatagtccccaatcgtttctttataggaggttattacatttcattacagtcactgcattttgactgttgtgtttagaatttgaatgtacatccaaaatgatgagtttcaatttaagagccttaataaaatgtgtgagtgtgtctcaattgaa

SEQ ID NO: 227 - DNA, 4796 bp, Homo sapiens
  source 1..4796: mol_type = genomic DNA
ctgcgcagtctgaggcgtccctcgcgtcgggtggaagagcggctgcgcaacaagtgaacctatggattaaggtgtagccgggcggcccggaggttgagagtgcaagattattctgcgcctgcgcggcccgggtaactttgctggctgctcctaggctcccggctcgccgccatcttgtattggggtttcattgttcccgctgggccgggcggtttagtgtaattgccgccggaggaggaggcggagtaacctctggtcagccgagaaaccccactatcctgtagccataaccgcttaaacgatttgggaggtagtgaagggcagggagctggacctggaggcgccgccgcgacagcagcagccatggaggacgagatgcccaagactctatacgtcggtaacctttccagagatgtgacagaagctctaattctgcaactctttagccagattggaccttgtaaaaactgcaaaatgattatggatacagctggaaatgatccctattgttttgtggagtttcatgagcatcgtcatgcagctgcagcattagctgctatgaatggacggaagataatgggtaaggaagtcaaagtgaattgggcaacaacccctagcagtcaaaagaaagatacaagcagtagtaccgttgtcagcacacagcgttcacaagatcatttccatgtctttgttggtgatctcagcccagaaattacaactgaagatataaaagctgcttttgcaccatttggaagaatatcagatgcccgagtggtaaaagacatggcaacaggaaagtctaagggatatggctttgtctcctttttcaacaaatgggatgctgaaaacgccattcaacagatgggtggccagtggcttggtggaagacaaatcagaactaactgggcaacccgaaagcctcccgctccaaagagtacatatgagtcaaataccaaacagctatcatatgatgaggttgtaaatcagtctagtccaagcaactgtactgtatactgtggaggtgttacttctgggctaacagaacaactaatgcgtcagactttttcaccatttggacaaataatggaaattcgagtctttccagataaaggatattcatttgttcggttcaattcccatgaaagtgcagcacatgcaattgtttctgttaatggtactaccattgaaggtcatgttgtgaaatgctattggggcaaagaaactcttgatatgataaatcccgtgcaacagaatcaaattggatatccccaaccttatggccagtggggccagtggtatggaaatgcacaacaaattggccagtatatgcctaatggttggcaagttcctgcatatggaatgtatggccaggcatggaaccagcaaggatttaatcagacacagtcttctgcaccatggatgggaccaaattatggagtgcaaccgcctcaagggcaaaatggcagcatgttgcccaatcagccttctgggtatcgagtggcagggtatgaaacccagtgaataaggactccagaatctaaagccagtggcttgaggctacagggagtgtagtaaagccgttgtttacttaaagatttatcaaatcagtcagtgcaaatgtcagatacaatgtatttatttaaaagattcatttttaatcatgaaattacttatcatccacattgttttaaaaagaaacaagatgctggatgtctgccaatttttgccttcattaccttttttgataaagtttctcagatccttgtttcaaacacaaatgcagggattgctgccactttttaactattaagaggcagaaaattgcacaatattgaacttttttccactgaagtagtgtgcagttctagtttgcattcctgatatgatttaaaacatgtaatataaagatgttaaaaaaaaaaaccaaaactgtgcagagtctagaagttgtttgtcatcttcagcttgtgcacaattctgttttaggttaaaaaaaggcattgtttgagctgtcccatctccactgttatccctttggggttttttaatataaattattagtttacatcatttttgtatctacatcttttttcacaaatttgtcttgccttattaaagttctgtaaaatatacttaaatggaaaaaatgatgttcatttagattgaaaacttttctcagatggattgataattgcattcatcttgtgttttatatgagaaggtgcctcaagaatttcctgttggatttgtttaaaaggatttttatctttcgtgataaactttgctgtgtaccaggaactataaaaacaaaaacttgttactaaagaaaatatctgaaatgtgataagttcttatgccatgttaatttcatgtgtcaacttcaacatttacatgtattatttcattatgtaaaatgttttagcaatttaatattttgcacagttagcaaactttgtatgtcatttccttcaaggcatcatgcagagttgacatgagatttataaggttttaagttgtttgcatgtgaaaatcaaatacatactttggtagtctttgaatacaaagtcatctgctcttgtttttcaagaattttgagacacaaagttgtatgtaaaggaatatattaatttgccgttttctaggtagatttgctcaaaaagagtgaatcaacttaatatgtacaaatgatagctgtgaaactgtagaatatctttgtgtcaggcttggagttcattgtgacctccaaattttgcctgaaggaccagctgggcaaagcatcttttaaatgttcagaggccaaaagataaacaaaaaaaaaaccttaaaatcctacctctttaaacagccttcagataagagaatcctcagtgcaatcattattttgattcgtttggtacctgttttcctggagttcccgattttattattttggggtggctccaagcattaagaggtttaatctttgatggcattgttctagttttgaaatttctagtatatttcagagtctcttagaagacttgtgtgggaagtttcactttgttttcagtgaagatcacaaacctccttcttcctttactcaagaggaaaggtcccagtatacatatttgaatggttgatggttttcaagaccttcagggagctccctgcattttacctagaaacagaaaaggcccgcaaaatcttaagtttcctggcctgcatttcccgggtaggggcaaatgactccaagctggtctctaagccaatacccttataaaccagagcccaggaaagacagctcgagtgtataattctctggagctcaattctatgcagttgtgctgatatttcattaagtcactgtgtatttttaagtgttgatacattaaaagtcgctttatggaagatgagtaaattttttaaatacttggaaattttatttccttgttaacttctacagatcagggcatgcaaccaaaagcagcttaaatgaaatattttaaaataaaatatcaggaagctatttttagatttcttctggcttatgtttctactttaggaccctcattgttctcttattaaaaaaaattatttcctgtgcatctcatggactgcagggtaaattatttgggcataaataatttaaatagttttctttcattttgactatctccagtaataacagtttttattatccagcatattggcttattgcacaaatcttaaaatgtacattgactactttctgagaagaaagtggtatcagtactcatgatgaaaaggttactactgaacaaattcacatttcaggaacacctctatctttggtttaaatcttactcttagtttttccgtctaaaaatcatactggtattagtatcaggtaaggaaattaaagtttttaaaatggtttcattctctgcaatatgcaaaatttagattttactttctggtactgtaaagaacctgaagtgatttacacttaatgggtgattaatccagtattctttaccctgaatgtttggatattaaagttcctttatgttttctataacctgtgggatcttcttgcagtgattattgtgtgtgagattttttttctttttggtctatccatattgttatattcactcaggtattttttttttaatcttattccagaatcagtggtttatattgggttactgtttaacaccaaatggaattggcattctgcagatttaattaattatgaaaccagggtctcattttccttgctgatacttgttgaaaatgagattcacattctagtctttattttcctcctgttttgtccctgtgcttgtacatcttccttttatttgtgtgttatagttctattccatttgagaaggcagttggtaagaactagattgcatgtacaaagacaggtttactaagtgctgtacagtggtcctgaggttacagttgaattagaaaaacgaaatgtacttacaggaaataagaaagcaaacctttcaaatgagagtgatgatttctttaaaaaaaatcagtttttttctctcaaataatgttctttatttcacgaaatcgtcaatcttaagcatgagcagggataaacaactcctagaaggaactcaattcattcttcctggattttctctgttgttaaatcacaaaaatgatagtccccaatcgtttctttataggaggttattacatttcattacagtcactgcattttgactgttgtgtttagaatttgaatgtacatccaaaatgatgagtttcaatttaagagccttaataaaatgtgtgagtgtgtctcaattgaa

SEQ ID NO: 228 - DNA, 619 bp, Homo sapiens
  source 1..619: mol_type = genomic DNA
gtaaagctaggcctgctgggagaggatgaggaggaggccctgcccctccaaacgtggcctcctatggacacccagactcacagccttcctatcacccacactcagctccatagcaactctcagccccaaagccgcacctgcacccgccattgccaaaccttcagccagagttgcagacagagccatcgtggcagccggagccagagctccagccagagcccggccagccaccgcaacccaactggagcccacagctcatccggccaccagagccagagtcccaacactagtccaccaccaaagcgccacaaaaagactatgaactcccaccactctcccatgcggcccaccatcctgcactgccgctgccccaagaacagaaagaacttggaaggcaagctgaaaaagaaaaaaatggccaagaggatccagcaggtgtacaaaaccaagacgcggagctcaggatggaaatccaactaatgagaccgcactccttggcttgttcctgcgtgtttcacccaaaggagaaaatgctaggatgaagtcaatcttcttgcaggaacatgttactatggtgatttctacgcaacactaattaaagcttgtacctggaagacta

SEQ ID NO: 229 - DNA, 1385 bp, Homo sapiens
  source 1..1385: mol_type = genomic DNA
agcgcggcgcgggggaggcacggctggaagaggcagtcaatcgctgggtgctcaagttctacttccacgaggcgctgcgggcctttcggggtagccggtacggggacttcagacagatccgggacatcatgcaggctttggttgtcaggcccttggggaaggagcacaccgtgtcccgattgctgcgggttatgcagtgtctgtcgcggattgaagaaggggaaaatttagactgttcctttgatatggaggctgagctcacaccactggaatcagctatcaatgtgctggagatgattaaaacggaatttacactgacagaagcagtggtcgaatccagtagaaaactggtcaaggaagctgctgtcattatttgtatcaaaaacaaagaatttgaaaaggcttcaaaaattttgaaaaaacatatgtccaaggaccccacaactcagaagctgagaaatgatctcctgaatattattcgagaaaagaacgtggcccatcctgttatccagaacttttcatatgagaccttccagcagaagatgctgcgcttcctggagagccacctggatgacgccgagccctacctcctcacgatggccaaaaaggctttgaaatctgagtccgctgcctcaagtacagggaaggaagataaacagccagcaccagggcctgtggaaaagccacccagagaacccgcaaggcagctacggaatcctccaaccaccattggaatgatgactctgaaagcagctttcaagactctgtctggtgcacaggattctgaggcagcctttgcaaaactggaccagaaggatctggttcttcctactcaagctctcccagcatcaccagccctcaaaaacaagagacccagaaaagatgaaaacgaaagttcagccccggctgacggtgagggtggctcggaactgcagcccaagaacaagcgcatgacaataagcagattggtcttggaggaggacagccagagtactgagcccagcgcaggcctcaactcctcccaggagaccgcttcagcgccaccatccaagcccaccgttctcaaccaacccctccctggagagaagaatcccaaagtacccaaaggcaagtggaacagctctaatggggttgaagaaaaggagacttgggtggaagaggatgaactgtttcaagttcaggcagcaccagatgaagacagtacaaccaatataacaaaaaagcagaagtggactgtagaagaaagcgagtgggtcaaggctggagtgcagaaatatggggaaggaaactgggctgccattactaaaaattacccatttgttaaccgaacagctgtgatgattaaggatcgctggcggaccatgaaaagacttggcatgaactga

SEQ ID NO: 230 - DNA, 1304 bp, Homo sapiens
  source 1..1304: mol_type = genomic DNA
atggcctctgcgccctggccggagcgggttccgaggctgctcgctccgcgcttaccctcttacccgcccccacccccaacagtgggattacggtccatggagcaggaggagacctacctggagctctacctggaccagtgcgccgctcaggatggccttgccccacccaggtctcccctgttcagcccagttgtaccttatgatatgtacatactgaatgcatccaatccggatactgcatttaattcgaaccctgaagtcaaagaaacatctggtgatttctcatctgtggatcttagcttcctaccagatgaagttacccaggaaaataaagaccagcctgtcattagcaaacacgaaactgaagaaaattctgaaagccaaagtccacaaagtaggttgccatcacccagcgaacaggacgttgggctgggcttaaacagcagcagtttgtcaaattcccattcacagctgcaccctggtgatactgactcagtccagccctctcctgagaaaccaaactccgactccttgtctctggcatccataactcccatgacaccaatgacccctatttcagaatgttgtggaattgtacctcaactacagaatatagtttccactgtaaacctggcctgtaagttggatctgaagaaaatagctttgcatgcaaaaaatgcagaatataacccaaagaggtttgctgctgtcataatgaggatccgagagcccaggacaacagcccttatatttagctctgggaagatggtctgcacgggagccaaaagtgaagagcagtctcgacttgcagcaagaaaatatgctcgtgtggtgcagaagcttgggttccctgccagattcctcgattttaaaattcagaacatggttggaagctgtgatgtgagatttcccatcaggctggaaggtttggtgctaacccatcagcagttcagtagttacgagcctgaactgtttcctggtcttatttatagaatggtaaaaccacgaattgtgttgcttatctttgtatctggaaaagttgtgttgacaggtgccaaagaacgttctgagatctatgaagcatttgaaaacatctatcctattctaaaaggttttaaaaaagcctgagcatatcattcagcatctcacattattctggtttgaatatgtccataagcccagcacagaaacagctggattcttctacgtttaattgtagatgttacaagtacgttacttattaaagggcgactctgtgtaagtaacctaagaaacgaagaaaaattcttatycaaaaaaaaaaa

SEQ ID NO: 231 - DNA, 1216 bp, Strongylocentrotus purpuratus
  source 1..1216: mol_type = genomic DNA
ttgtagaaggtctctccgcttctctgcaatactaccaagcatcctacagctcaaccatgcagtctctcatcgctttcttggccgtccttgtcggggtagccgtcgcccacccgatggttctctcgcccgccgaacagaaccagcagaacaaagatatctcggccaaggagttcctgaagaagatgttcccggcggactcgacggtgtcctccatccgaagcgacaatcaagtggatgaggacatcgttcaacagctacgggctctggggcttcgtgaggcagcgaacatttccgagcaggttgacctgaggcaggttctccgagacagtgacctttcatctgtcacattgtgcatgcccagtgacaaggctgtccaaaagtggaggcaggagcttcctgctaagctgaggccagaccaggaggccatgaggaacctggtcaaggcttgggccgtttcaggaagggtcgagtcttcgcagatcaccgacaaccagaaggtccagagtctgaacggcgccaagctaagattcaacgtctaccgtgactcgaaaaagatgatcaccgttaatggcgctcgagtcattgacgccgacaggaatgctagcagtggactcgtccacgtagtcgacaaggtcatctatccactcccagtcggtaacgtaatggagaccctggatgataatcaagccttctccatcgtcgtcgatctcctgaaacaagccggactcgaagatgaacttagaaattctgaccccatcacggttcttgtgccgaccaacgccgctttccaagccctcccatccggggtcctcgacgacctcaaaaaggataccgccggcaaactccggaacctgctcaagtaccacgtgatctctgacgtcaagtattctgcctctttgaagtctggtcagcgcctccgtgcctcgcagggagatgagatttcggttgcccgcgacagtgatgatcaaattctcctgaacaagcatagtgaccagtcaaaagcttcccgggtgatcctacgcgatatccccacaaccaatggagtgattcaggtcgtcgaccgggtcattctcccgtcacaaaaacacttcgttctagtttaaaaaactggacgacccggttcccgatacagcccatacgatatggacttattatcagaatattaattgaatgtcgtgatacaatcatgaatctgtatttttagtacggaaataaa

SEQ ID NO: 232 - DNA, 2321 bp, Mus musculus
  source 1..2321: mol_type = genomic DNA
ggggcggggctctgacgcgcttccggtggtgctgtcgttcagccgctgtgaggattccagactccaaagcggttctgagtcacggtgagcctgcgagtcccagtgctgtaattacaggtatgcaccaccacgacttcagcttggagtttccaagtgcagagtgtcttaagggcattatctactacaaggtttgaagagtggcactttaagaaccagaaacccaaaggtaccaggtctactcctaaaagtcctgctggctcgggaatctgtgatgactaaggtggtgggcatggccacagttctgggccccaggccacctcaggaatctatgggaccttcgcccattaaagtagaagaggatgaagagaaagacaagtgctgccctaccctagagctatcccataagcacttcagacagtctgggaaccaagatacccttgagccaatgggtccttcgaccattaaagctgaagaggatgaaagcaaagacaagtgccgccctaacctagagatatcccgtaagagcttcaagcagtttgggtaccaagacactcttgagcagttgggaccttcgaccattaaagctgaagaggatgatgagaaggataagggccaccctagcccagagatatctcgacagcgcttcaggcaatttgggtaccatgacactcctgggccccgagaggcactgagccagcttcgggtgctctgctgtgagtggctacagcccgagatccacaccaaagagcagattctagagctactggttctggagcagttcctgaccatcctgccccgagagctccagacctgggtacagcagcactgccctgaaagtgcagaggaggccgtcactctcctggaagacctggagcaagaacttgatgagccaggactgcaggtctcatctcctccaaatgaacagaagcagtcttgggagaaaatgtcaacttcaggaacggcaatggagtccttaagcagtactgagacccaacatgtggatgccagccctaaatatgagttttgggggcccctgtacatccaagagactggtgaggaggaggtttttactcaggatccaagaaagcgccaaggttttaaatcgaatccccagaaggaggactcagcagatgagcacagaagttctgaagaagagtctcatgcagacggactcaaaagaaccgtcatccccatgattcctgccaataagtatgggtcacggtcagaaaggcagtgggccaacaacctggagagggagagagggacaaaagcctctcttcaagacacaggttccaggaaaggggcagagccagcgtctactaggcctgccccaggagagaaacgttacatatgtgcagagtgtgggaaggcctttagcaatagctcaaacctcactaagcaccggagaacacacactggggagaagccttatgtgtgtacaaagtgtgggaaggctttcagccacagctccaaccttacccttcattaccgaactcacctggtggaccggccctatgactgtaagtgtgggaaagcctttgggcagagctcagacctccttaaacatcaaaggatgcacacggaagaggcgccctatcagtgtaaagactgtgggaaagcctttagtgggaagggcagcctcattcgacactatcgcatccacacaggggagaagccctatcagtgtaatgagtgtggaaagagttttagtcagcatgcaggtctcagttctcatcagcgtctgcatacaggggagaaaccctataagtgtaaggagtgtggcaaagccttcaaccatagttcaaattttaataagcatcatagaatccatactggcgaaaagccctattggtgtagccactgtgggaaaaccttctgtagcaagtccaatctgtccaagcatcagagagttcacactggagagggagaagtccagtaacggtccattctcgtctgttgttctcgttgtaaacgttagaatgcgaatgctaggaagaagctctgtaatgcatttgatgtttgatagtaggttttgctgtagtcatcaagggtgccttggagggagagctacacagtgatagagcagacaggaggtctacagaggagcagggagctccacacactccaggccccagtgtactgtgtgtccagtatagttaaggaagaaacattaaaattgtttaactgttttaacatgtatcccacagttgtagtttgtaaagaattgagccaccttgaacagtctgattcagaataaacgtatagcatcatgtagcgtctcaggactgttattgtgataaacaatgttgctataaaacttg

SEQ ID NO: 233 - DNA, 2236 bp, Mus musculus
  source 1..2236: mol_type = genomic DNA
ggggcggggctctgacgcgcttccggtggtgctgtcgttcagccgctgtgaggattccagactccaaagcggttctgagtcacggtgagcctgcgagtcccaggtttgaagagtggcactttaagaaccagaaacccaaaggtaccaggtctactcctaaaagtcctgctggctcgggaatctgtgatgactaaggtggtgggcatggccacagttctgggccccaggccacctcaggaatctatgggaccttcgcccattaaagtagaagaggatgaagagaaagacaagtgctgccctaccctagagctatcccataagcacttcagacagtctgggaaccaagatacccttgagccaatgggtccttcgaccattaaagctgaagaggatgaaagcaaagacaagtgccgccctaacctagagatatcccgtaagagcttcaagcagtttgggtaccaagacactcttgagcagttgggaccttcgaccattaaagctgaagaggatgatgagaaggataagggccaccctagcccagagatatctcgacagcgcttcaggcaatttgggtaccatgacactcctgggccccgagaggcactgagccagcttcgggtgctctgctgtgagtggctacagcccgagatccacaccaaagagcagattctagagctactggttctggagcagttcctgaccatcctgccccgagagctccagacctgggtacagcagcactgccctgaaagtgcagaggaggccgtcactctcctggaagacctggagcaagaacttgatgagccaggactgcaggtctcatctcctccaaatgaacagaagcagtcttgggagaaaatgtcaacttcaggaacggcaatggagtccttaagcagtactgagacccaacatgtggatgccagccctaaatatgagttttgggggcccctgtacatccaagagactggtgaggaggaggtttttactcaggatccaagaaagcgccaaggttttaaatcgaatccccagaaggaggactcagcagatgagcacagaagttctgaagaagagtctcatgcagacggactcaaaagaaccgtcatccccatgattcctgccaataagtatgggtcacggtcagaaaggcagtgggccaacaacctggagagggagagagggacaaaagcctctcttcaagacacaggttccaggaaaggggcagagccagcgtctactaggcctgccccaggagagaaacgttacatatgtgcagagtgtgggaaggcctttagcaatagctcaaacctcactaagcaccggagaacacacactggggagaagccttatgtgtgtacaaagtgtgggaaggctttcagccacagctccaaccttacccttcattaccgaactcacctggtggaccggccctatgactgtaagtgtgggaaagcctttgggcagagctcagacctccttaaacatcaaaggatgcacacggaagaggcgccctatcagtgtaaagactgtgggaaagcctttagtgggaagggcagcctcattcgacactatcgcatccacacaggggagaagccctatcagtgtaatgagtgtggaaagagttttagtcagcatgcaggtctcagttctcatcagcgtctgcatacaggggagaaaccctataagtgtaaggagtgtggcaaagccttcaaccatagttcaaattttaataagcatcatagaatccatactggcgaaaagccctattggtgtagccactgtgggaaaaccttctgtagcaagtccaatctgtccaagcatcagagagttcacactggagagggagaagtccagtaacggtccattctcgtctgttgttctcgttgtaaacgttagaatgcgaatgctaggaagaagctctgtaatgcatttgatgtttgatagtaggttttgctgtagtcatcaagggtgccttggagggagagctacacagtgatagagcagacaggaggtctacagaggagcagggagctccacacactccaggccccagtgtactgtgtgtccagtatagttaaggaagaaacattaaaattgtttaactgttttaacatgtatcccacagttgtagtttgtaaagaattgagccaccttgaacagtctgattcagaataaacgtatagcatcatgtagcgtctcaggactgttattgtgataaacaatgttgctataaaacttg

SEQ ID NO: 234 - DNA, 2302 bp, Mus musculus
  source 1..2302: mol_type = genomic DNA
ggggcggggctctgacgcgcttccggtggtgctgtcgttcagccgctgtgaggattccagactccaaagcggttctgagtcacgtgctgtaattacaggtatgcaccaccacgacttcagcttggagtttccaagtgcagagtgtcttaagggcattatctactacaaggtttgaagagtggcactttaagaaccagaaacccaaaggtaccaggtctactcctaaaagtcctgctggctcgggaatctgtgatgactaaggtggtgggcatggccacagttctgggccccaggccacctcaggaatctatgggaccttcgcccattaaagtagaagaggatgaagagaaagacaagtgctgccctaccctagagctatcccataagcacttcagacagtctgggaaccaagatacccttgagccaatgggtccttcgaccattaaagctgaagaggatgaaagcaaagacaagtgccgccctaacctagagatatcccgtaagagcttcaagcagtttgggtaccaagacactcttgagcagttgggaccttcgaccattaaagctgaagaggatgatgagaaggataagggccaccctagcccagagatatctcgacagcgcttcaggcaatttgggtaccatgacactcctgggccccgagaggcactgagccagcttcgggtgctctgctgtgagtggctacagcccgagatccacaccaaagagcagattctagagctactggttctggagcagttcctgaccatcctgccccgagagctccagacctgggtacagcagcactgccctgaaagtgcagaggaggccgtcactctcctggaagacctggagcaagaacttgatgagccaggactgcaggtctcatctcctccaaatgaacagaagcagtcttgggagaaaatgtcaacttcaggaacggcaatggagtccttaagcagtactgagacccaacatgtggatgccagccctaaatatgagttttgggggcccctgtacatccaagagactggtgaggaggaggtttttactcaggatccaagaaagcgccaaggttttaaatcgaatccccagaaggaggactcagcagatgagcacagaagttctgaagaagagtctcatgcagacggactcaaaagaaccgtcatccccatgattcctgccaataagtatgggtcacggtcagaaaggcagtgggccaacaacctggagagggagagagggacaaaagcctctcttcaagacacaggttccaggaaaggggcagagccagcgtctactaggcctgccccaggagagaaacgttacatatgtgcagagtgtgggaaggcctttagcaatagctcaaacctcactaagcaccggagaacacacactggggagaagccttatgtgtgtacaaagtgtgggaaggctttcagccacagctccaaccttacccttcattaccgaactcacctggtggaccggccctatgactgtaagtgtgggaaagcctttgggcagagctcagacctccttaaacatcaaaggatgcacacggaagaggcgccctatcagtgtaaagactgtgggaaagcctttagtgggaagggcagcctcattcgacactatcgcatccacacaggggagaagccctatcagtgtaatgagtgtggaaagagttttagtcagcatgcaggtctcagttctcatcagcgtctgcatacaggggagaaaccctataagtgtaaggagtgtggcaaagccttcaaccatagttcaaattttaataagcatcatagaatccatactggcgaaaagccctattggtgtagccactgtgggaaaaccttctgtagcaagtccaatctgtccaagcatcagagagttcacactggagagggagaagtccagtaacggtccattctcgtctgttgttctcgttgtaaacgttagaatgcgaatgctaggaagaagctctgtaatgcatttgatgtttgatagtaggttttgctgtagtcatcaagggtgccttggagggagagctacacagtgatagagcagacaggaggtctacagaggagcagggagctccacacactccaggccccagtgtactgtgtgtccagtatagttaaggaagaaacattaaaattgtttaactgttttaacatgtatcccacagttgtagtttgtaaagaattgagccaccttgaacagtctgattcagaataaacgtatagcatcatgtagcgtctcaggactgttattgtgataaacaatgttgctataaaacttg

SEQ ID NO: 235 - DNA, 1972 bp, Homo sapiens
  source 1..1972: mol_type = genomic DNA
gggtgtgtctgtggcgtctcatggcaggaggctcagccacgacctggggttaccctgtggccctgctactgctggttgccaccctggggctgggtaggtggctccagcccgaccctggcctcccaggcctccggcacagctacgactgtgggatcaagggaatgcagctgctggtgttccccaggccaggccagactctccgcttcaaggtggtggatgaatttgggaaccgatttgatgtcaacaactgctccatctgctaccactgggtcacctccaggccgcaggagcctgcagtcttctcggccgattacagaggctgccacgtgctggagaaggatgggcgtttccacctgagggtgttcatggaggctgtgctgcccaatggtcgtgtggatgtggcacaagacgctactctgatctgtcccaaacctgacccctcccggactctggactcccagctggcaccacccgccatgttctctgtctcaaccccacaaaccctttccttcctccccacctctggccatacctcccaaggctctggccatgcctttcccagcccactggacccagggcacagctctgtccacccaacccctgctttaccatcccctggacctggacctaccctcgccaccctggctcaaccccactggggcaccttggaacactgggatgtgaacaaacgagattacataggtacccacctgagccaggagcagtgccaggtggcctcagggcacctcccctgcatcgtgagaagaacttcaaaagaagcctgtcagcaggctggctgctgctatgacaacaccagagaggttccctgttactatggcaacacagctactgtccagtgcttcagagatggctacttcgtcctcgtggtgtcccaagaaatggccttgacacacaggatcacactggccaacatccacctggcctatgcccccaccagctgctccccaacacagcacacggaagctttcgtggtcttctacttccctctcacccactgtggaaccacaatgcaggtggctggcgaccagctcatctatgagaactggctggtgtctggcatccacatccaaaaggggccacagggttccatcacgcgggacagcaccttccagcttcatgtgcgctgtgtcttcaacgccagtgacttcctgcccattcaggcatccattttcccacccccatcgcctgctcctatgacccagcccggccccctgcggcttgagctgcggattgccaaagacgagaccttcagctcgtactatggggaggatgactatcccatcgtgaggctgctccgagaaccagtccatgtggaggtccggcttctgcagaggacagaccccaacctggtcctgctgctgcaccagtgctggggcgctcccagtgccaaccccttccagcagccccagtggcccatcctgtcagacggatgccctttcaagggcgacagctacagaacccaaatggtagccttggacggggccacacctttccagtcgcactaccagcgattcactgttgctaccttcgccctcctggactcaggctcccagagagccctcagaggactggtttacttgttctgcagcacctctgcctgccacacctcagggctggagacttgctccactgcatgtagcactggcactacaagacagcgacgatcctcaggtcaccgtaatgacactgccaggccccaggacatcgtgagctctccggggccagtgggctttgaggattcttatgggcaggagcccacacttgggcccacagactccaatgggaactccagcctgagacctctcctttgggcggtccttttgctgccagctgttgccctggtccttgggtttggtgtctttgtgggcctgagccagacctgggcccagaagctctgggaaagcaacagacagtgaatgggcccaataaacaatcatttcaaacctactga

SEQ ID NO: 236 - DNA, 2749 bp, Homo sapiens
  source 1..2749: mol_type = genomic DNA
gtgtgatgttcccctccctgtgtccatgtgttctcattgttcagctcccacttataagtgagaacagaatgttaagaatcatttttgtaataactttagtttttcctacctcctgataggagacactgttttacggagcagctatttcttcctgtgttcaaagtcagttgctgaacagatggtagcttcctgcttttccggagcagaatcctagacatggatgctcctgggcccagagccatttgttcggtggctgtccccagcacaccacaggtctgggttagggcagctggcagaatacccggcgcaagctgtcaggaatcagaggccacttccttccccaatccttccgtttcagctgggagaatgggacaagattcaggtgcccccaatggggagagggtgtggatgcggctggcttcctgctataaaaacacagagcagcctaccctctacctggttgatctggtagtgtcttctgctatggcgtgcaggcagagaggaggctcttggagtccctcaggctggttcaatgcaggctggagcacctacaggtcgatttctctcttcttcgcccttgtgacttcagggaactccatagatgtttctcagttggtaaatcctgcctttccaggcactgtcacttgcgatgaaagggaaataacagtggagttcccaagcagtcctggcaccaagaaatggcatgcatctgtggtggatcctcttggtctcgacatgccgaactgcacttacatcctggacccagaaaagctcaccctgagggctacctatgataactgtaccaggagagtgcatggtggacaccagatgaccatcagagtcatgaacaacagtgctgccttaagacacggagctgtcatgtatcagttcttctgtccagctatgcaagtagaagagacccaggggctttcagcatctacaatctgccagaaggatttcatgtctttttccttgccacgggtcttctctggcttggctgacgacagtaaggggaccaaagttcagatgggatggagcattgaggttggtgatggtgcaagagccaaaactctgaccctgccagaggccatgaaggaaggcttcagcctcttgattgacaaccacaggatgaccttccatgtgccattcaatgccactggagtgactcactatgtgcaaggtaacagtcatctctacatggtgtctctgaagcttacatttatatctcctggacagaaggtgatcttctcttcacaagctatttgtgcaccagatcctgtgacctgcaatgccacacacatgactctcaccataccagagtttcctgggaagcttaagtctgtgagctttgaaaaccagaacattgatgtgagccagctgcatgacaatggaattgatctagaagcaacaaatggcatgaaattgcatttcagcaaaactctgctcaaaacgaaattatctgaaaaatgcctactccatcagttctacttagcttcactcaagctgacctttctccttcggccagagacagtatccatggtgatctatcctgagtgtctctgtgagtcacccgtttctatagttacaggggagctgtgcacccaggatgggtttatggacgtcgaggtctacagctaccaaacacaaccagctcttgacctgggtactctgagggtgggaaactcatcctgccagcctgtctttgaggctcagtctcaggggctggtacggttccacatacccctgaatggatgtggaacgagatataagttcgaagatgataaagtcgtctatgaaaacgaaatacatgctctctggacggattttcctccaagcaaaatatctagagacagtgagttcagaatgacagtgaagtgttcttatagcaggaatgacatgctactaaacatcaacgttgaaagccttactcctccagtggcctcagtgaagttgggtccatttaccttgatcctgcaaagctacccagataattcctaccaacaaccttatggggaaaacgagtaccctctagtgagattcctccgccaaccaatttacatggaagtgagagtcctaaacagggatgaccccaacatcaagctggtcttagatgactgctgggcgacgtccaccatggatccagactctttcccccagtggaacgttgtcgtggatggctgtgcatatgacctggacaactaccagaccaccttccatccagtcggctcctctgtgacccatcctgatcactatcagaggtttgacatgaaggcttttgcctttgtatcagaagcccacgtgctctctagcctggtctacttccactgcagtgccttaatctgtaatcgactctcccctgactccccactgtgttctgtgacctgccctgtgtcctctaggcacaggcgagccacaggggccactgaagcagagaaaatgacagtcagcctcccaggacccattctcctgttgtcagatgactcctcattcagaggtgtcggctcatctgatctaaaagcaagtgggagcagtggggagaagagtaggagtgaaacaggggaggaggttggctcacgaggtgctatggacaccaaagggcacaagactgctggagatgttggttccaaagctgtggctgctgtggctgcctttgcaggtgtggtggcaactctaggcttcatctactacctgtacgagaaaaggactgtgtcaaatcactaaatgggcttctaaataaagcagtcaaaat

SEQ ID NO: 237 - DNA, 2722 bp, Homo sapiens
  source 1..2722: mol_type = genomic DNA
gtgtgatgttcccctccctgtgtccatgtgttctcattgttcagctcccacttataagtgagaacagaatgttaagaatcatttttgtaataactttagtttttcctacctcctgataggagacactgttttacggagcagctatttcttcctgtgttcaaagtcagttgctgaacagatggtagcttcctgcttttccggagcagaatcctagacatggatgctcctgggcccagagccatttgttcggtggctgtccccagcacaccacaggtctgggttagggcagctggcagaatacccggcgcaagctgtcaggaatcagaggccacttccttccccaatccttccgtttcagctgggagaatgggacaagattcaggtgcccccaatggggagagggtgtggatgcggctggcttcctgctataaaaacacagagcagcctaccctctacctggttgatctggtagtgtcttctgctatggcgtgcaggcagagaggaggctcttggagtccctcaggctggttcaatgcaggctggagcacctacaggtcgatttctctcttcttcgcccttgtgacttcagggaactccatagatgtttctcagttggtaaatcctgcctttccaggcactgtcacttgcgatgaaagggaaataacagtggagttcccaagcagtcctggcaccaagaaatggcatgcatctgtggtggatcctcttggtctcgacatgccgaactgcacttacatcctggacccagaaaagctcaccctgagggctacctatgataactgtaccaggagagtgcatggtggacaccagatgaccatcagagtcatgaacaacagtgctgccttaagacacggagctgtcatgtatcagttcttctgtccagctatgcaagtagaagagacccaggggctttcagcatctacaatctgccagaaggatttcatgtctttttccttgccacgggtcttctctggcttggctgacgacagtaaggggaccaaagttcagatgggatggagcattgaggttggtgatggtgcaagagccaaaactctgaccctgccagaggccatgaaggaaggcttcagcctcttgattgacaaccacaggatgaccttccatgtgccattcaatgccactggagtgactcactatgtgcaaggtaacagtcatctctacatggtgtctctgaagcttacatttatatctcctggacagaaggtgatcttctcttcacaagctatttgtgcaccagatcctgtgacctgcaatgccacacacatgactctcaccataccagagtttcctgggaagcttaagtctgtgagctttgaaaaccagaacattgatgtgagccagctgcatgacaatggaattgatctagaagcaacaaatggcatgaaattgcatttcagcaaaactctgctcaaaacgaaattatctgaaaaatgcctactccatcagttctacttagcttcactcaagctgacctttctccttcggccagagacagtatccatggtgatctatcctgagtgtctctgtgagtcacccgtttctatagttacaggggagctgtgcacccaggatgggtttatggacgtcgaggtctacagctaccaaacacaaccagctcttgacctgggtactctgagggtgggaaactcatcctgccagcctgtctttgaggctcagtctcaggggctggtacggttccacatacccctgaatggatgtggaacgagatataagttcgaagatgataaagtcgtctatgaaaacgaaatacatgctctctggacggattttcctccaagcaaaatatctagagacagtgagttcaggaatgacatgctactaaacatcaacgttgaaagccttactcctccagtggcctcagtgaagttgggtccatttaccttgatcctgcaaagctacccagataattcctaccaacaaccttatggggaaaacgagtaccctctagtgagattcctccgccaaccaatttacatggaagtgagagtcctaaacagggatgaccccaacatcaagctggtcttagatgactgctgggcgacgtccaccatggatccagactctttcccccagtggaacgttgtcgtggatggctgtgcatatgacctggacaactaccagaccaccttccatccagtcggctcctctgtgacccatcctgatcactatcagaggtttgacatgaaggcttttgcctttgtatcagaagcccacgtgctctctagcctggtctacttccactgcagtgccttaatctgtaatcgactctcccctgactccccactgtgttctgtgacctgccctgtgtcctctaggcacaggcgagccacaggggccactgaagcagagaaaatgacagtcagcctcccaggacccattctcctgttgtcagatgactcctcattcagaggtgtcggctcatctgatctaaaagcaagtgggagcagtggggagaagagtaggagtgaaacaggggaggaggttggctcacgaggtgctatggacaccaaagggcacaagactgctggagatgttggttccaaagctgtggctgctgtggctgcctttgcaggtgtggtggcaactctaggcttcatctactacctgtacgagaaaaggactgtgtcaaatcactaaatgggcttctaaataaagcagtcaaaat

SEQ ID NO: 238 - DNA, 1315 bp, Homo sapiens
  source 1..1315: mol_type = genomic DNA
gaggcggctgcctgctgctctgcaggtaccatggagctgagctataggctcttcatctgcctcctgctctggggtagtactgagctgtgctacccccaacccctctggctcttgcagggtggagccagccatcctgagacgtccgtacagcccgtactggtggagtgtcaggaggccactctgatggtcatggtcagcaaagacctttttggcaccgggaagctcatcagggctgctgacctcaccttgggcccagaggcctgtgagcctctggtctccatggacacagaagatgtggtcaggtttgaggttggactccacgagtgtggcaacagcatgcaggtaactgacgatgccctggtgtacagcaccttcctgctccatgacccccgccccgtgggaaacctgtccatcgtgaggactaaccgcgcagagattcccatcgagtgccgctaccccaggcagggcaatgtgagcagccaggccatcctgcccacctggttgcccttcaggaccacggtgttctcagaggagaagctgactttctctctgcgtctgatggaggagaactggaacgctgagaagaggtcccccaccttccacctgggagatgcagcccacctccaggcagaaatccacactggcagccacgtgccactgcggttgtttgtggaccactgcgtggccacaccgacaccagaccagaatgcctccccttatcacaccatcgtggacttccatggctgtcttgtcgacggtctcactgatgcctcttctgcattcaaagttcctcgacccgggccagatacactccagttcacagtggatgtcttccactttgctaatgactccagaaacatgatatacatcacctgccacctgaaggtcaccctagctgagcaggacccagatgaactcaacaaggcctgttccttcagcaagccttccaacagctggttcccagtggaaggcccggctgacatctgtcaatgctgtaacaaaggtgactgtggcactccaagccattccaggaggcagcctcatgtcatgagccagtggtccacgtctgcttcccgtaaccgcaggcatgtgacagaagaagcagatgtcaccgtgggggccactgatcttcctggacaggagtggtgaccatgaagtagagcagtgggctttgccttctgacacctcagtggtgctgctgggcgtaggcctggctgtggtggtgtccctgactctgactgctgttatcctggttctcaccaggaggtgtcgcactgcctcccaccctgtgtctgcttccgaataaaagaagaaa

1. A method for reprogramming a cell from a first phenotype to at least one second, developmentally-activated, pluripotent, multipotent, self-renewing, differentiating, disease resistant and/or disease ameliorating phenotype,
said method comprising,
transfecting a nucleated cell wherein one or more transfection step is performed ex vivo, in vitro or in vivo, and wherein said nucleated cell is transfected with or overexpresses: a) an inducing agent, b) a natural or synthetic nucleic acid, c) a vector, d) a synthetic oligonucleotide, e) a vector comprising one or more synthetic oligonucleotide, f) a vector for gene therapy, g) a non-integrating vector, h) an episomal, high capacity, integrase-deficient lentiviral vector, i) a self-inactivating vector, j) a virus, k) a small RNA sequence, l) an aptamer, m) a recombinant retrovirus, n) a recombinant lentivirus, o) a polypeptide, p) a partial protein, q) a synthetic protein, r) a recombinant protein s) CRISPR/CAS9, t) a ribonucleic acid, and/or u) a deoxyribonucleic acid encoding a polypeptide, and wherein said polypeptide is;
i. one or more first polypeptide(s) selected from PRR+Numb, Oct3/4, Sox2, Nanog and a polypeptide with LIF activity;
ii. one or more second polypeptide(s) selected from PRR+Numb, Oct4, Sox2, Nanog, Notch, Fgf4, Hoxb4, Lin28, Lif, Lifr, Cntf, Cardiotrophin, Osm, Osm-r, Il6, Il6r, Hyper Il6, Il-11, Gp130, Stat3, C-myc, and a polypeptide with Lif Activity.
iii. one or more third polypeptide(s) selected from one or more of a short Numb isoform, Numblike, MyoD, myogenin, Myocardin, Ifrd1, Myf5, Myf6, Mef2c, Mef2a, Mef2c, Tbx5, JAK inhibitor I, Nkx2.5, Esrrg, Mesp1, Zfpm2 Ets2, Mesp, Myocd, Nkx2.5, Hand2, Gata 4, Gata 5, and Gata 6, Sox9, CREB-binding polypeptide, Runx2, HNF-1, HNF-3, HNF-4, HNF-6, Cebpa, Cebpb, Atf5, Prox1, Foxa3, Foxa1, Foxa2, Lmx1a, Lmx1b, Brn2, Otx2, Nurr1, REN, Neurogenin1, Neurogenin2, Neurogenin3, Mash 1 (Ascl1), Phox2a, Phox2b, dHand, Brn2, Myt1, Gata3, Shh, FGF8, Lmx1b, Nkx2.2, Pet1, Lbx1, Rnx, PITX2, Dlx2, Dlx5, REN, Ngn2, Ptx-3, Gata2, REST4, Foxa2, Sox17, Mafa, HLXB9, Runx1/AML, ERG, GATA2, LMO2, RUNX1c, Nov(Con3), SCL, Runit1, Hlf, Prdm5, Pbx1, Zfp37, Mycn, Meis1, FOSB, GFI1, SPI1 Pdx1, Olig1, Olig2, Zfp536, Nkx2.2, Nkx6.2, Sox10, ST18, Gm98, Myt1, Nov(Ccn3), Foxo1, Er71, Klf2, Tal1, Zfp488, Six1, Six2, Osr1, Eya1, Hoxal1, Snai2, PRDM16, Nfia, Nfib, Etv2, Fli1, Erg1, Klf2, Lmo2, Mitf, Sox10, Pax3, Hes1, Id1, Pax6, Brn4, Klf4, E47; NeuroD1, Neurod2, Myt1l, Lhx3, Hb9, Isl1, Adam3, Akap3, Aurkc Bmp15, Fig1a, Figa1pha, Daz1, Stra8, Fox12, Oogenesin1, Oogenesin2, Oogenesin3, Oogenesin4, Sycp2, Sycp3, Spol1, Rec8, Dmc1, Mos, Stag3, Ccnb1, Foxo1, Foxo3, Foxr1, Sohlh1, Sohlh2, Nobox, Obox1, Obox2, Obox3, Obox4, Obox6, Oaz3, Otx2, Ldhc, Lhx3, Lhx8, Lhx9, Oog1, Sp1, Zfp38, Trf2, Tb2/trf3, Taf4b, Taf71, Taf71, Tia1, Phtf1, Tnp2, Hils1, Daz1, Bmp15, Pttg3, Aurkc, Otx2, Sox15, Sox30, Foxr1, Alf, Oct4, Dppa3/stella, Zfp38, Rps6ka3, Hinfp, Npat, Sp1, Sp3, Hoxa1, Hoxa7, Hex, Yp30, Zp1, Zp2, Zp3, Sfe1, Sfe9, Opo, Pln, Rdv, Gld1, Clgn, Tekt1, Fscn3, Dnahc8, Gdf9, Pttg3, or said nucleotide comprises an antisense Hes1 RNA;
iv. one or more fourth polypeptide(s) altering the amount, activity and/or antigenicity of a cellular protein;
v. a protein deficient in a patient;
and/or
vi. one or more fifth polypeptide(s) selected from an enzyme, a structural protein, a signal transduction protein, a cellular transport protein, a receptor protein, a transcription factor protein, a regulatory protein, a cellular communication protein, a hormone protein, and/or a protein deficient in a patient or subject.

2. The method of claim 1, further comprising
forcing the nucleated cells through filters of progressively reduced size;
incubating the nucleated cells with compounds reducing miR21 expression;
growing the transfected cell in a first incubation step effective that the transfected cell grows at a first growth rate;
differentiating the transfected cell in a second incubation step;
isolating transfected cells and/or their progeny from the growth or differentiation medium after achieving a desired cell number and a desired state of differentiation;
administering the isolated cells to a subject in need of such cells; and/or
culturing the transfected cell in an environment selected from de-cellularized cadaveric tissue, a two-dimensional scaffold, a three-dimensional scaffold, a two-dimensional format, a three-dimensional format and hanging drops.

3. The method of claim 1, further comprising
assessing the transfected cell or its progeny according to morphology, expression of cellular markers, secreted proteins, transgenic markers, antibiotic markers, fluorescent markers, a marker gene encoded by a transgene expressing vector, an antibiotic resistance gene, a fluorescent protein gene, or a reporter gene under the control of a cell type specific promoter;
screening the transfected cell or its progeny for successful transfection, HLA type, initiation of differentiation, or using standard PCR or nucleic acid hybridization-based methods.
cryopreserving the transfected cell or its progeny and/or
transplanting the transfected cell or its progeny to an individual or to a patient in need thereof.

4. The method of claim 1, wherein:
the vector comprises synthetic oligonucleotides directed against a HIV co-receptor, a decoy sequence, an HIV-2 RRE decoy sequence and/or an HIV-2 TAR decoy sequence, wherein the vector is capable of retarding HIV, SIV, or FIV infection;
and/or
the vector is capable of retarding HIV-1, HIV-2, and/or FIV infection and includes one or more decoy and/or synthetic oligonucleotide sequences and synthetic oligonucleotides directed against one or more of HIV co-receptors, where the synthetic oligonucleotides include oligonucleotides selected from the group siRNA, miRNA and shRNA.

5. The method of claim 1, wherein the synthetic oligonucleotides comprise miRNA, siRNA, or shRNA sequences directed against an HIV co-receptor, against CXCR4 and/or against CCR5.

6. The method of claim 1, wherein the nucleated cell is selected from the group of stem/progenitor cells and somatic cell types, said stem/progenitor cells comprising donor cells, autologous cells, HLA type compatible cells, reprogrammed cells, induced multipotent cells, induced pluripotent cells, cells derived from bone marrow, peripheral blood, placental blood, amniotic fluid, umbilical cord blood, banked sources, cryopreserved sources, skin, adipose tissue, non-human embryo cells, hematopoietic cells, spermatogonia, primordial germ cells, leukocytes, lymphocytes, epithelial cells, buccal check cells, and genetically-modified cells.

7. The method of claim 1,
wherein the nucleated cell is transfected with a vector encoding a second polypeptide, wherein the vector encoding said second polypeptide does not integrate into the genome of said cell, and/or with ribonucleic acids or deoxyribonucleic acids encoding one or more second polypeptides, and/or wherein the nucleated cell is transfected with or overexpresses one or more second polypeptide(s) selected from those with >70% homology to PRR+Numb, Oct4, Sox2, Nanog, Notch, Fgf4, Hoxb4, Lin28, Lif, Lifr, Cntf, Cardiotrophin, Osm, Osm-r, Il6, Il6r, Hyper Il6, Il-11, Gp130, Stat3, C-myc, and a polypeptide with Lif Activity. and/or
the nucleated cell is transfected with a vector encoding a third polypeptide, wherein the vector encoding said third polypeptide does not integrate into the genome of said cell, and/or with ribonucleic acids or deoxyribonucleic acids encoding one or more third polypeptides, and/or wherein the nucleated cell is transfected with or overexpresses one or more third polypeptide(s) selected from those with >70% homology to a short Numb isoform, Numblike, MyoD, myogenin, Myocardin, Ifrd1, Myf5, Myf6, Mef2c, Mef2a, Mef2c, Tbx5, JAK inhibitor I, Nkx2.5, Esrrg, Mesp1, Zfpm2 Ets2, Mesp, Myocd, Nkx2.5, Hand2, Gata 4, Gata 5, and Gata 6, Sox9, CREB-binding polypeptide, Runx2, HNF-1, HNF-3, HNF-4, HNF-6, Cebpa, Cebpb, Atf5, Prox1, Foxa3, Foxa1, Foxa2, Lmx1a, Lmx1b, Brn2, Otx2, Nurr1, REN, Neurogenin1, Neurogenin2, Neurogenin3, Mash 1 (Ascl1), Phox2a, Phox2b, dHand, Brn2, Myt1, Gata3, Shh, FGF8, Lmx1b, Nkx2.2, Pet1, Lbx1, Rnx, PITX2, Dlx2, Dlx5, REN, Ngn2, Ptx-3, Gata2, REST4, Foxa2, Sox17, Mafa, HLXB9, Runx1/AML, ERG, GATA2, LMO2, RUNX1c, Nov(Con3), SCL, Runit1, Hlf, Prdm5, Pbx1, Zfp37, Mycn, Meis1, FOSB, GFI1, SPI1 Pdx1, Olig1, Olig2, Zfp536, Nkx2.2, Nkx6.2, Sox10, ST18, Gm98, Myt1, Nov(Ccn3), Foxo1, Er71, Klf2, Tal1, Zfp488, Six1, Six2, Osr1, Eya1, Hoxal1, Snai2, PRDM16, Nfia, Nfib, Etv2, Fli1, Erg1, Klf2, Lmo2, Mitf, Sox10, Pax3, Hes1, Id1, Pax6, Brn4, Klf4, E47; NeuroD1, Neurod2, Myt1l, Lhx3, Hb9, Isl1, Adam3, Akap3, Aurkc Bmp15, Fig1a, Figa1pha, Daz1, Stra8, Fox12, Oogenesin1, Oogenesin2, Oogenesin3, Oogenesin4, Sycp2, Sycp3, Spol1, Rec8, Dmc1, Mos, Stag3, Conb1, Foxo1, Foxo3, Foxr1, Sohlh1, Sohlh2, Nobox, Obox1, Obox2, Obox3, Obox4, Obox6, Oaz3, Otx2, Ldhc, Lhx3, Lhx8, Lhx9, Oog1, Sp1, Zfp38, Trf2, Tb2/trf3, Taf4b, Taf71, Taf71, Tia1, Phtf1, Tnp2, Hils1, Daz1, Bmp15, Pttg3, Aurkc, Otx2, Sox15, Sox30, Foxr1, Alf, Oct4, Dppa3/stella, Zfp38, Rps6ka3, Hinfp, Npat, Sp1, Sp3, Hoxa1, Hoxa7, Hex, Yp30, Zp1, Zp2, Zp3, Sfe1, Sfe9, Opo, Pln, Rdv, Gld1, Clgn, Tekt1, Fscn3, Dnahc8, Gdf9, and Pttg3, or the nucleic acid comprises antisense Hes1 RNA.

8. The method of claim 1, wherein the nucleated cell is transfected with or overexpresses one or more small RNA selected from the miR-302/367 cluster small RNAs (miR-302a, miR-302b, miR-302c, miR-302d, miR-367), human miR-371-373 cluster small RNAs (miR-371, miR-372, miR-373), miR-17-92, C 19MC cluster members, miR-133b, miR 200a, miR 23a, and miR 743b-5p, miR-187, miR-299-3p, miR-499-5p, miR-628-5p, miR-888, let-7 (let-7-b,c,f,g), miR-30 (miR-30-a-c), the mouse miR-290-295 cluster small RNAs (miR-290, miR-291a-3p, miR-291b, miR-292, miR-294, miR-295, miR-29, miR-296, miR-106a cluster, miR138, miR 130, miR-301, miR-721, and miR-93;
and/or
the nucleated cell is transfected with or overexpresses one or more small RNA selected from miR-124, miR-125b, miR-128, miR-1-1, miR-1-2, miR-1, miR-1-1, miR-1-2, miR-9/9, miR-206, miR-26a, miR-133, miR-133 a-1, miR-133 a-2, miR-208, miR-499, MMU-MIR351, M MU-MIR615, MMU-MIR592, MMU-MIR882, MMU-MIR185, MMU-MIR491, MMU-MiR326, MMU-MiR330, MIR212, miR-128, miR-181, miR-16, miR-103, miR-107, miR-150, miR-181, miR-155, miR-24, miR-17, miR-16, miR-103, miR-107, miR-150, miR-155, miR-221, miR-222, miR-451, miR-16, miR-24, miR-17-5p, miR-20a, miR-106a, miR-16, miR-103, miR-107, miRNA-155, miR-24, miR-17, miR-223, miR-16, miR-103, miR-107, miR-155, miR-24, miR-17, miR-125b, miR-26a, miR-203, miR-302, miR-302-367.

9. The method of claim 1, comprising growing the transfected cell in a growth medium optionally containing one or more agent, chemical, compound, extract or drug selected from EGF, IL-7, oncostatin, CNTF, soluble gp130, bFGF, steel factor, LIF, cardiotrophin, OSM, IL6, hyper IL6, a cytokine having LIF activity, a growth enhancing cytokine, Forskolin, VPA, BIX01294, RG108, PD0325901, CHIR99021, vitamin C, RepSox, A83-01, Thiazovivin, Purmophamin, LDN193189, RG108, SP600125, G06983, Y-27632, VC6TFZ: VPA, 5-aza-cytidine, 616452, Tranylcypromine, 2-methyl-5-hydroxytryptamine (2-Me-5HT), and D4476, effective that the cell grows at a first growth rate; and/or incubating the cell in a differentiation medium;
and/or
comprising incubating the transfected cells in a differentiation medium comprising one or more agent, chemical, compound, extract or drug selected from the group consisting of retinoic acid, Forskolin, ISX9, CHIR99021, SB431542, I-BET151, Forskolin, PD0325901, LDN193189, Pifithrin-α, SP600125, G06983, Y-27632, Neurotrophin 3 (NT3), LIF, nerve growth factor (NGF), glial cell-line derived growth factor (GDNF), interferon γ (IFN-γ), hexamethylene bis acrylamide, dimethylsulfoxide, fetal bovine serum (FBS), normal bovine serum (NBS), vascular endothelial growth factor (VEGF), a colony stimulating factor, thrombopoietin, M-CSF (CSF-1), GM-CSF, IL-7, and cardiomyocyte conditioned medium.

10. The method of claim 1, comprising genetically modifying the nucleated cell.

11. The method of claim 1, wherein one or more step comprises use of one or more of electroporation, sonoporation, laser based transfection, gene gun, a non-integrating vector, CRISPR/CAS9 or other methods included in the category of site-specific genetic modification, a nanocapsule, a nanovault, a cationic lipid, a liposome, or comprises avoiding retroviral/lentiviral integration or other random alteration of the genomes of the nucleated cells, the nucleated cell is transfected with a vector that does not integrate into the genome of said cell, and/or the method does not use oncogenes.

12. A cell treated according to the method of claim 1.

13. The method of claim 1, wherein the cell is selected from nucleated cells, somatic cells, leukocytes, lymphocytes, mature peripheral blood T lymphocytes, monocytes, macrophages, T cell progenitors, macrophage-monocyte progenitor cells, and multipotent hematopoietic stem cells found in umbilical cord blood, peripheral blood, and occupying bone marrow spaces, CD4+ T cells, CD 34+ stem/progenitor cells, quiescent cells, dividing cells, and/or stem cells or progenitor cells capable of differentiation in vitro or in vivo into CD 34+ stem/progenitor cells, T cell progenitors, macrophage-monocyte progenitors, T cells, CD4+ T cells, and/or macrophages, and/or one or more transfected polypeptide or nucleic acid encoding said polypeptide corresponds to a membrane associated, signal transduction, and/or receptor protein.

14. A non-integrating vector for use in the method of claim 1, wherein the vector encodes one or more polypeptide.

15. The method of claim 1, wherein the nucleated cell or its progeny are
transfected with a membrane associated, signal transduction, and/or receptor protein, expanded ex vivo,
cultured under conditions which promote growth of the cells at an optimal growth rate,
cultured under conditions which promote cell growth at a rate which is typically less than the optimal rate,
administered to the patient and expanded in vivo, and/or
injected into the circulation, the bone marrow, or into a lesion site, and/or
the method is capable of ameliorating abnormal growth, proliferation or cancer.

16. The method of claim 1, wherein the nucleated cell is transfected simultaneously with two or more nucleic acids, two or more vectors, or two or more polypeptides.

17. The method of claim 1, wherein neoplastic potential is altered in the transfected cell, or wherein the transfected cell is capable of promoting growth in a target tissue, ameliorating a disease, ameliorating an injury or repairing a tissue.

18. The vector of claim 1,
wherein the vector is capable of retarding HIV-1, HIV-2, and/or FIV infection and includes one or more decoy and/or synthetic oligonucleotide sequences and synthetic oligonucleotides directed against one or more of HIV co-receptors;
wherein the synthetic oligonucleotides include oligonucleotides selected from the group siRNA, miRNA and shRNA;
wherein the vector targets a sequence with at least 70% identity to a viral genomic nucleotide sequence or its complement, comprises synthetic oligonucleotide sequences that reduce the ability of target cells to sustain HIV replication by >70%, comprises synthetic oligonucleotide sequences that reduce HIV viral activity by >70%;
wherein the vector comprises one or more synthetic nucleotide sequence comprising SEQ ID NO: 3, SEQ ID NO: 4, SEQ ID NO: 5, SEQ ID NO: 6, SEQ ID NO: 7, SEQ ID NO: 8, the nucleotides at positions 12-26 of SEQ ID NO: 8, SEQ ID NO: 9, SEQ ID NO: 10, SEQ ID NO: 11, SEQ ID NO: 12, SEQ ID NO: 13, SEQ ID NO: 14, SEQ ID NO: 15, SEQ ID NO: 16, and/or SEQ ID NO: 17; and/or
the vector comprises a polycistronic expression cassette, a transcriptional promoter element, and multiple nucleic acid encoding sequences operably linked to a transcriptional promoter element.

19. A method for screening the transfected cell of claim 1, wherein the cell and/or its progeny has been cultured in the presence of a protein, an agent, an inducing agent, candidate agent, chemical, compound, extract or drug wherein said method for screening comprises assessing the nucleated cell according to secreted proteins, morphology, differentiation, phenotypic change, marker gene expression, RNA expression, reverse transcriptase polymerase chain reaction (RT-PCR), Northern blot, cell sorting, expression of cellular markers, transgenic markers, antibiotic markers, fluorescent markers, a marker gene encoded by a transgene expressing vector, an antibiotic resistance gene, a fluorescent protein gene, a reporter gene under the control of a cell type specific promoter, and/or whether the cell and/or its progeny survive or die.

20. The transfected cells and/or their progeny treated according to the method of claim 1.
